(19) United States
(12) Patent Application Publication
(10) Pub. No.: US 2026/0185104 A1
(43) Pub. Date: Jul. 2, 2026

(54) Antisense oligonucleotides for treatment of USHER 2A. Exons 39-40

(71) Applicant: Stichting Radboud universitair medisch centrum, Nijmegen (NL)

(72) Inventor: Hendrikus Antonius Rudolfus Van Wyk, Nijmegen (NL)

(73) Assignee: Stichting Radboud universitair medisch centrum, Nijmegen (NL)

(21) Appl. No.: 19/129,031

(22) PCT Filed: Nov. 15, 2023
(86) PCT No.: PCT/EP2023/081811

§ 371 Date: May 12, 2025

(30) Foreign Application Priority Data
Nov. 15, 2022 (EP) 22207524.4

(51) Int. Cl. C12N 15/113

(52) U.S. Cl. CPC C12N 15/1138; C12N 2310/14; C12N 2310/313; C12N 2310/321; C12N 2320/33

(57) ABSTRACT

The invention relates to the fields of medicine and immunology. In particular, it relates to novel antisense oligonucleotides that may be used in the treatment, prevention and/or delay of an USH2A related disease or condition.

### FIELD OF THE INVENTION

[0001] The invention relates to the fields of medicine and immunology. In particular, it relates to novel antisense oligonucleotides that may be used in the treatment, prevention and/or delay of conditions associated with USH2A.

### BACKGROUND OF THE INVENTION

[0002] Retinitis pigmentosa (RP) is a genetically and clinically heterogeneous condition that is currently still largely untreatable. Patients usually present with a progressive loss of visual function that initially manifests with night blindness and visual field constriction during adolescence, and progresses towards the loss of central vision and ultimately legal blindness in later stages of life. With a predicted overall prevalence of 1 in 4,000 individuals, RP is estimated to affect almost two million individuals worldwide. Mutations in USH2A are the most frequent cause of RP with an autosomal recessive mode of inheritance (arRP), accounting for up to 23% of all arRP cases. Besides non-syndromic RP, mutations in USH2A can also result in Usher syndrome. Patients suffering from Usher syndrome experience a double sensory impairment (combination of RP and congenital hearing impairment) making the development of a therapy to halt or delay their progressive vision loss even more urgent. The delayed onset and slowly progressive nature of USH2A-associated RP, and the nowadays often early genetic diagnosis of Usher syndrome resulting from genetic testing after the observation of congenital hearing impairment, provides ample time for therapeutic intervention.

[0003] USH2A, located on chromosome 1q41, spans approximately 800 kb and encodes two different isoforms of the usherin protein. The large usherin isoform consists of 5202 amino acids and is encoded by 72 exons. This isoform is predominantly expressed in photoreceptor cells of the retina and hair cells of the cochlea. The short isoform consists of 1546 amino acids encoded by a transcript that is built up by the 5′ 21 exons, and is expressed more widely. In total, over 600 different mutations have been identified in the transcript encoding the large isoform of usherin. As these mutations are mostly private and distributed all over the gene, the development of a mutation-independent therapy is preferred to eventually treat a significant group of patients (USH2A¬LOVD mutation database, https://databases.lovd.nl/shared/variants/USH2A/unique).

[0004] The size of the usherin-encoding sequence (15.6 kb) severely hampers the development of conventional gene augmentation therapy. The protein-encoding sequence by far exceeds the packaging capacity of adeno-associated virus (AAV) vectors (4.7 kb) and lentiviral vectors (8 kb), which are the currently preferred vehicles for retinal gene delivery. This makes conventional AAV- and LV-mediated gene augmentation therapy for USH2A-asociated RP very challenging. An attractive alternative approach is antisense oligonucleotide (ASO)-induced splice modulation. In this approach, ASOs are applied to correct aberrant pre-mRNA splicing or to remove native in-frame exons harboring recurrent loss-of-function mutations. Both approaches aim to restore the original open reading frame and protein function. By targeting the pre-mRNA, ASOs are able to simultaneously and transiently modulate all endogenous transcripts encoding the different protein isoforms without altering transcription levels. We previously presented ASO-induced splice correction as a promising treatment option for the correction of aberrant mRNA splicing caused by the deep intronic c.7595-2144A>G mutation in USH2A (Slijkerman, R. W., et al, Therapy-Nucleic Acids, 2016. 5: p. e381).

[0005] More recently, we published the first ASO-based exon skipping therapy for mutations affecting USH2A exon 13 (Dulla, K., et al., Molecular Therapy, 2021). This single exon skipping therapy reached the clinical phase and resulted in a concordant benefit in multiple parameters of visual function (i.e. visual acuity, static perimetry and retinal imaging) without induction of any serious adverse events (Trial #NCT03780257) (Therapeutics, P., ProQR Announces Positive Results from Clinical Trial of QR-421a in Usher Syndrome and Plans to Start Pivotal Trials. 2021). Skipping of USH2A exon 13 was not intended to result in the removal of a single protein domain. Instead, it resulted in the loss of 4 EGF-lam domains and formation of one EGF-like hybrid domain. The resulting shortened usherin protein was shown to retain function. The amount of single USH2A exons that meet all criteria, and of which skipping is predicted to result in a functional protein, is minimal.

[0006] However, there remains a need to for treatment options for Usher syndrome patients that are affected by mutations in, or malfunction of other regions of the transcript. To date treatment options for these Usher patients are limited to cochlear implants or hearing aids.

### SUMMARY OF THE INVENTION

[0007] The invention relates to a set of antisense oligonucleotides for skipping of exon 39 and 40 that bind to and/or are complementary to a polynucleotide with the nucleotide sequence as shown in SEQ ID NO: 1. Preferably the set of antisense oligonucleotides bind to and/or are complementary to a polynucleotide selected from the group consisting of SEQ ID NO: 2, SEQ ID NO: 3 and SEQ ID NO: 4, preferably to a polynucleotide selected from the group consisting of SEQ ID NO: 5 and SEQ ID NO:6, and preferably to a polynucleotide selected from the group consisting of SEQ ID NO: 7 and SEQ ID NO:8 or a part thereof.

[0008] The invention further provides for a set of antisense oligonucleotides for skipping of exon 39 and 40 that comprises at least two antisense oligonucleotides that comprise or consist of SEQ ID NO: 9 or 10.

[0009] In a further aspect, the invention provides for a viral vector expressing at least one antisense oligonucleotide for skipping exons 39 or 40 as defined herein when placed under conditions conducive to expression of the molecule.

[0010] In yet a further aspect the invention provides for a pharmaceutical composition comprising the set of antisense oligonucleotides for skipping exons 39 and 40 as described herein or the viral vector as described herein and a pharmaceutically acceptable excipient.

[0011] The invention also provides for a set of antisense oligonucleotides for skipping exons 39 and 40 as described herein or the viral vector as described herein for use as a medicament. In some embodiments the set of antisense oligonucleotides for skipping exons 39 and 40 as described herein or the viral vector as described herein is for use in the treatment of a USH2A related disease or condition requiring modulating splicing of antisense oligonucleotide. In some embodiments wherein the USH2A related disease or condition is USH2A-associated Retinitis pigmentosa (RP).

[0012] The invention further provides for a method for modulating splicing of USH2A in a cell, said method comprising contacting said cell with the set of antisense oligonucleotides for skipping of exon 39 and 40 as described herein, the vector according as described herein or the pharmaceutical composition as described herein.

[0013] Lastly the invention provides for a use of the set of antisense oligonucleotides for skipping of exon 39 and 40 as described herein, the vector as described herein or the pharmaceutical composition according to as described herein for treating an USH2A related disease or a condition requiring modulating splicing of USH2A.

### DETAILED DESCRIPTION OF THE INVENTION

[0014] Calculations based on available carrier frequencies in the general population for the various reported pathogenic variants indicate that 9,500 individuals worldwide suffer from USH2A-associated disease caused by (a) variant(s) in these exons. Surprisingly it has now been demonstrated that specific antisense oligonucleotides (ASOs) are able to induce the dual skipping of exons 39 and 40. This dual exon skipping results in a transcript encoding a shortened usherin protein that lacks exactly one of the repetitive fibronectin type III (FN3) domains. This carefully designed dual exon skipping approach is further shown to be highly promising as a future treatment option for USH2A-associated RP.

[0015] Accordingly, in a first aspect, the invention relates to a set of antisense oligonucleotides for the skipping of exon 39 and 40 of USH2A that bind to and/or are complementary to a polynucleotide with the nucleotide sequence as shown in SEQ ID NO: 1. Preferably the antisense oligonucleotides bind to and/or are complementary to a polynucleotide with the nucleotide selected from the group consisting of SEQ ID NO: 2, SEQ ID NO: 3 and SEQ ID NO: 4. More preferably the polynucleotide is selected from the group consisting of SEQ ID NO: 5 and SEQ ID NO:6, and even more preferably the polynucleotide is selected from the group consisting of SEQ ID NO: 7 and SEQ ID NO:8 or a part thereof.

[0016] The terms “antisense oligonucleotide”, “ASO” and “AON” are used interchangeably herein and are understood to refer to an oligonucleotide molecule comprising a nucleotide sequence which is substantially complementary to a target nucleotide sequence in a pre-mRNA molecule, hnRNA (heterogenous nuclear RNA) or mRNA molecule. The degree of complementarity (or substantial complementarity) of the antisense sequence is preferably such that a molecule comprising the antisense sequence can form a stable hybrid with the target nucleotide sequence in the RNA molecule under physiological conditions. Binding of an ASO to its target can easily be assessed by the person skilled in the art using techniques that are known in the field such as the gel mobility shift assay as described in EP1619249.

[0017] The term “set” as used herein is defined as comprising at least two, at least three, at least four or more antisense oligonucleotides that bind and/or are complementary to a polynucleotide with the nucleotide sequence as shown in SEQ ID NO: 1, preferably selected from the group consisting of SEQ ID NO: 2, SEQ ID NO: 3 and SEQ ID NO: 4, preferably selected from the group consisting of SEQ ID NO: 5 and SEQ ID NO: 6, preferably selected from the group consisting of SEQ ID NO: 7 and SEQ ID NO:8 or a part thereof. In certain embodiments the set of antisense oligonucleotides according to the invention comprises at least one antisense oligonucleotide that binds and/or is complementary to SEQ ID NO: 3, preferably that binds and/or is complementary to SEQ ID NO: 5, more preferably that binds and/or is complementary to SEQ ID NO: 7 or a part thereof and at least one antisense oligonucleotide that binds and/or is complementary to SEQ ID NO: 4, preferably that binds and/or is complementary to SEQ ID NO: 6, more preferably that binds and/or is complementary to SEQ ID NO: 8 or a part thereof. In certain embodiments the set of antisense oligonucleotides according to the invention comprises at least two antisense oligonucleotides that binds to SEQ ID NO: 3, preferably that binds and/or is complementary to SEQ ID NO: 5, more preferably that binds and/or is complementary to SEQ ID NO: 7 or a part thereof and at least one antisense oligonucleotide that binds to SEQ ID NO: 4 preferably that binds and/or is complementary to SEQ ID NO: 6, more preferably that binds and/or is complementary to SEQ ID NO: 8 or a part thereof.

[0018] The term “complementary” used in the context of the invention indicates that some mismatches in the antisense sequence are allowed as long as the functionality, i.e. inducing the skipping of exons 39-40 is achieved. Preferably, the complementarity is from 90% to 100%. In general this allows for 1 or 2 mismatches in an ASO of 20 nucleotides or 1, 2, 3 or 4 mismatches in an ASO of 40 nucleotides, or 1, 2, 3, 4, 5 or 6 mismatches in an ASO of 60 nucleotides, etc. Optionally, said ASO may further be tested by transfection into isolated cells comprising USH2A. The complementary regions are preferably designed such that, when combined, they are specific for the intron or exon in the pre-mRNA or mRNA. Such specificity may be created with various lengths of complementary regions, as this depends on the actual sequences in other (pre-) mRNA molecules in the system. The risk that the ASO will also be able to hybridize to one or more other (pre-) mRNA molecules decreases with increasing size of the ASO. It is clear that ASOs comprising mismatches in the region of complementarity but that retain the capacity to hybridize and/or bind to the targeted region(s) in the (pre-) mRNA, can be used in the invention. However, preferably at least the complementary parts do not comprise such mismatches as ASOs lacking mismatches in the complementary part typically have a higher efficiency and a higher specificity than ASOs having such mismatches in one or more complementary regions. It is thought, that higher hybridization strengths, (i.e. increasing number of interactions with the opposing strand) are favorable in increasing the efficiency of the process of interfering with the splicing or mRNA degradation machinery of the system.

[0019] Each ASO within the set ASOs of according to the invention preferably does not contain a stretch of CpG, more preferably does not contain any CpG. The presence of a CpG or a stretch of CpG in an oligonucleotide is usually associated with an increased immunogenicity of said oligonucleotide (Dorn and Kippenberger, 2008). This increased immunogenicity is undesired since it may induce damage of the tissue to be treated, i.e. the retina or the inner ear. Immunogenicity may be assessed in an animal model by assessing the presence of CD4+ and/or CD8+ cells and/or inflammatory mononucleocyte infiltration. Immunogenicity may also be assessed in blood of an animal or of a human being treated with an ASO according to the invention by detecting the presence of a neutralizing antibody and/or an antibody recognizing said ASO using a standard immunoassay known to the skilled person. An inflammatory reaction, type I-like interferon production, IL-12 production and/or an increase in immunogenicity may be assessed by detecting the presence or an increasing amount of a neutralizing antibody or an antibody recognizing said ASO using a standard immunoassay. The ASO according to the invention furthermore preferably has acceptable RNA binding kinetics and/or thermodynamic properties. The RNA binding kinetics and/or thermodynamic properties are at least in part determined by the melting temperature of an oligonucleotide (Tm; calculated with the oligonucleotide properties calculator (www.unc.edu/-cail/biotool/oligo/index) for single stranded RNA using the basic Tm and the nearest neighbor model), and/or the free energy of the ASO-target intron/exon complex (using RNA structure version 4.5). If a Tm is too high, the ASO is expected to be less specific. An acceptable Tm and free energy depend on the sequence of the ASO. Therefore, it is difficult to give preferred ranges for each of these parameters. An acceptable Tm may be ranged between 35 and 70° C. and an acceptable free energy may be ranged between 15 and 45 kcal/mol.

[0020] In certain embodiments, each of the antisense oligonucleotides within the set of antisense oligonucleotides for skipping exons 39 and 40 according to the invention has a length of from about 8 to about 40 nucleotides, preferably from about 10 to about 40 nucleotides, more preferably from about 14 to about 30 nucleotides, more preferably from about 16 to about 24 nucleotides, such as 16, 17, 18, 19, 20, 21, 22, 23 or 24 nucleotides.

[0021] In certain embodiments, the set of antisense oligonucleotides for skipping of exon 39 and 40 according as described herein comprises at least two antisense oligonucleotides that comprise or consist of SEQ ID NO: 9 or 10.

[0022] It is preferred that each antisense oligonucleotide for skipping exons 39 and 40 within the set of antisense oligonucleotides of the invention comprises one or more residues that are modified to increase nuclease resistance, and/or to increase the affinity of the antisense oligonucleotide for the target sequence. Therefore, in a certain embodiment, the antisense nucleotide sequence comprises at least one nucleotide analogue or equivalent, wherein a nucleotide analogue or equivalent is defined as a residue having a modified base, and/or a modified backbone, and/or a non-natural internucleoside linkage, or a combination of these modifications.

[0023] In certain embodiments, the nucleotide analogue or equivalent comprises a modified backbone. Examples of such backbones are provided by morpholino backbones, carbamate backbones, siloxane backbones, sulfide, sulfoxide and sulfone backbones, formacetyl and thioformacetyl backbones, methyleneformacetyl backbones, riboacetyl backbones, alkene containing backbones, sulfamate, sulfonate and sulfonamide backbones, methyleneimino and methylenehydrazino backbones, and amide backbones. Phosphorodiamidate morpholino oligomers are modified backbone oligonucleotides that have previously been investigated as antisense agents.

[0024] Morpholino oligonucleotides have an uncharged backbone in which the deoxyribose sugar of DNA is replaced by a six membered ring and the phosphodiester linkage is replaced by a phosphorodiamidate linkage. Morpholino oligonucleotides are resistant to enzymatic degradation and appear to function as antisense agents by arresting translation or interfering with pre-mRNA splicing rather than by activating RNase H. Morpholino oligonucleotides have been successfully delivered to tissue culture cells by methods that physically disrupt the cell membrane, and one study comparing several of these methods found that scrape loading was the most efficient method of delivery; however, because the morpholino backbone is uncharged, cationic lipids are not effective mediators of morpholino oligonucleotide uptake in cells. A recent report demonstrated triplex formation by a morpholino oligonucleotide and, because of the non-ionic backbone, these studies showed that the morpholino oligonucleotide was capable of triplex formation in the absence of magnesium.

[0025] In further embodiments that the linkage between the residues in a backbone do not include a phosphorus atom, such as a linkage that is formed by short chain alkyl or cycloalkyl internucleoside linkages, mixed heteroatom and alkyl or cycloalkyl internucleoside linkages, or one or more short chain heteroatomic or heterocyclic internucleoside linkages.

[0026] Examples of nucleotide analogue or equivalent comprises a Peptide Nucleic Acid (PNA), having a modified polyamide backbone (Nielsen, et al. (1991) Science 254, 1497-1500). PNA-based molecules are true mimics of DNA molecules in terms of base-pair recognition. The backbone of the PNA is composed of N-(2-aminoethyl)-glycine units linked by peptide bonds, wherein the nucleobases are linked to the backbone by methylene carbonyl bonds. An alternative backbone comprises a one-carbon extended pyrrolidine PNA monomer (Govindaraju and Kumar (2005) Chem. Commun, 495-497). Since the backbone of a PNA molecule contains no charged phosphate groups, PNA-RNA hybrids are usually more stable than RNA-RNA or RNA-DNA hybrids, respectively (Egholm et al (1993) Nature 365, 566-568). In certain embodiments the backbone comprises a morpholino nucleotide analog or equivalent, in which the ribose or deoxyribose sugar is replaced by a 6-membered morpholino ring. In certain embodiments the nucleotide analog or equivalent comprises a phosphorodiamidate morpholino oligomer (PMO), in which the ribose or deoxyribose sugar is replaced by a 6-membered morpholino ring, and the anionic phosphodiester linkage between adjacent morpholino rings is replaced by a non-ionic phosphorodiamidate linkage.

[0027] In yet a further embodiment, a nucleotide analogue or equivalent of the invention comprises a substitution of one of the non-bridging oxygens in the phosphodiester linkage. This modification slightly destabilizes base-pairing but adds significant resistance to nuclease degradation. A preferred nucleotide analogue or equivalent comprises phosphorothioate, chiral phosphorothioate, phosphorodithioate, phosphotriester, aminoalkylphosphotriester, H-phosphonate, methyl and other alkyl phosphonate including 3′-alkylene phosphonate, 5′-alkylene phosphonate and chiral phosphonate, phosphinate, phosphoramidate including 3′-amino phosphoramidate and aminoalkylphosphoramidate, thionophosphoramidate, thionoalkylphosphonate, thionoalkylphosphotriester, selenophosphate or boranophosphate.

[0028] In certain embodiments the nucleotide analogue or equivalent of the invention comprises one or more sugar moieties that are mono- or disubstituted at the 2′, 3′ and/or 5′ position such as a-OH; —F; substituted or unsubstituted, linear or branched lower (CI-C10) alkyl, alkenyl, alkynyl, alkaryl, allyl, or aralkyl, that may be interrupted by one or more heteroatoms; O—, S—, or N-alkyl; O—, S—, or N-alkenyl; O—, S- or N-alkynyl; O—, S—, or N-allyl; O-alkyl-O-alkyl, -methoxy, -aminopropoxy; methoxyethoxy; dimethylaminooxyethoxy; and -dimethylaminoethoxyethoxy.

[0029] The sugar moiety can be a pyranose or derivative thereof, or a deoxypyranose or derivative thereof, preferably ribose or derivative thereof, or deoxyribose or derivative of. A preferred derivatized sugar moiety comprises a Locked Nucleic Acid (LNA), in which the 2′-carbon atom is linked to the 3′ or 4′ carbon atom of the sugar ring thereby forming a bicyclic sugar moiety. A preferred LNA comprises 2′-O, 4′-C-ethylene-bridged nucleic acid (Morita et al. 2001. Nucleic Acid Res Supplement No. 1:241-242). These substitutions render the nucleotide analogue or equivalent RNase H and nuclease resistant and increase the affinity for the target RNA.

[0030] In another embodiment, a nucleotide analogue or equivalent of the invention comprises one or more base modifications or substitutions. Modified bases comprise synthetic and natural bases such as inosine, xanthine, hypoxanthine and other-aza, deaza, -hydroxy, -halo, -thio, thiol, -alkyl, -alkenyl , -alkynyl, thioalkyl derivatives of pyrimidine and purine bases that are or will be known in the art.

[0031] It is understood by a skilled person that it is not necessary for all positions in an antisense oligonucleotide to be modified uniformly. In addition, more than one of the aforementioned analogues or equivalents may be incorporated in a single antisense oligonucleotide or even at a single position within an antisense oligonucleotide. In certain embodiments, an antisense oligonucleotide of the invention has at least two different types of analogues or equivalents.

[0032] Accordingly, each antisense oligonucleotide for skipping exons 39 and 40 within the set of antisense oligonucleotides of the invention comprises a 2′-O alkyl phosphorothioate antisense oligonucleotide, such as 2′-O-methyl modified ribose (RNA), 2′-O-ethyl modified ribose, 2′-O-methoxyethyl modified ribose, 2′-O-propyl modified ribose, and/or substituted derivatives of these modifications such as halogenated derivatives.

[0033] In certain embodiments, the set of antisense oligonucleotides for skipping exons 39 and 40 according to the invention comprises an antisense oligonucleotide that comprises or consists of SEQ ID NO: 9 that comprises a 2′-O-methoxyethyl modified ribose and a phosphorothioate backbone.

[0034] In certain embodiments, the set of antisense oligonucleotides for skipping exons 39 and 40 according to the invention comprises an antisense oligonucleotide that comprises or consists of SEQ ID NO: 10 that comprises a 2′-O-methoxyethyl modified ribose and a phosphorothioate backbone.

[0035] Each antisense oligonucleotide for skipping exons 39 and 40 according to the invention, preferably, may be delivered as such. However, an antisense oligonucleotide for skipping exons 39 and 40 may also be encoded by a viral vector. Typically, this is in the form of an RNA transcript that comprises the sequence of an oligonucleotide according to the invention in a part of the transcript.

[0036] Accordingly, in one aspect, the invention provides for a viral vector expressing at least one antisense oligonucleotide for skipping exons 39 or 40 as defined herein when placed under conditions conducive to expression of the molecule.

[0037] Viral vectors as used herein include but are not limited to lentiviral vector systems and adenoviral vector systems.

[0038] A preferred expression system for an ASO for skipping exons 39 and 40 according to the invention is an adenovirus associated virus (AAV)-based vector. Single chain and double chain AAV-based vectors have been developed that can be used for prolonged expression of antisense nucleotide sequences for highly efficient degradation of transcripts. A preferred AAV-based vector, for instance, comprises an expression cassette that is driven by an RNA polymerase III-promoter (Pol III) or an RNA polymerase II promoter (Pol II). A preferred RNA promoter is, for example, a Pol III U6 RNA promoter, or a Pol II U7 RNA promoter.

[0039] The invention accordingly provides for a viral-based vector, comprising a Pol II or a Pol III promoter driven expression cassette for expression of an antisense oligonucleotide for skipping exons 39-40 of USH2A.

[0040] An AAV vector according to the invention is a recombinant AAV vector and refers to an AAV vector comprising part of an AAV genome comprising an encoded ASO for the skipping of exons 39-40 of USH2A according to the invention encapsidated in a protein shell of capsid protein derived from an AAV serotype as depicted elsewhere herein. Part of an AAV genome may contain the inverted terminal repeats (ITR) derived from an adeno-associated virus serotype, such as AAV1, AAV2, AAV3, AAV4, AAV5, AAV8, AAV9 and others. A protein shell comprised of capsid protein may be derived from an AAV serotype such as AAV1, 2, 3, 4, 5, 8, 9 and others. A protein shell may also be named a capsid protein shell. AAV vector may have one or preferably all wild type AAV genes deleted, but may still comprise functional ITR nucleic acid sequences. Functional ITR sequences are necessary for the replication, rescue and packaging of AAV virions. The ITR sequences may be wild type sequences or may have at least 80%, 85%, 90%, 95, or 100% sequence identity with wild type sequences or may be altered by for example in insertion, mutation, deletion or substitution of nucleotides, as long as they remain functional. In this context, functionality refers to the ability to direct packaging of the genome into the capsid shell and then allow for expression in the host cell to be infected or target cell. In the context of the invention a capsid protein shell may be of a different serotype than the AAV vector genome ITR. An AAV vector according to present the invention may thus be composed of a capsid protein shell, i.e. the icosahedral capsid, which comprises capsid proteins (VP1, VP2, and/or VP3) of one AAV serotype, e.g. AAV serotype 2, whereas the ITRs sequences contained in that AAV5 vector may be any of the AAV serotypes described above, including an AAV2 vector. An “AAV2 vector” thus comprises a capsid protein shell of AAV serotype 2, while e.g. an “AAV5 vector” comprises a capsid protein shell of AAV serotype 5, whereby either may encapsidate any AAV vector genome ITR according to the invention.

[0041] Preferably, a recombinant AAV vector according to the invention comprises a capsid protein shell of AAV serotype 2, 5, 8 or AAV serotype 9 wherein the AAV genome or ITRs present in said AAV vector are derived from AAV serotype 2, 5, 8 or AAV serotype 9; such AAV vector is referred to as an AAV2/2, AAV 2/5, AAV2/8, AAV2/9, AAV5/2, AAV5/5, AAV5/8, AAV 5/9, AAV8/2, AAV 8/5, AAV8/8, AAV8/9, AAV9/2, AAV9/5, AAV9/8, or an AAV9/9 vector.

[0042] More preferably, a recombinant AAV vector according to the invention comprises a capsid protein shell of AAV serotype 2 and the AAV genome or ITRs present in said vector are derived from AAV serotype 5; such vector is referred to as an AAV 2/5 vector.

[0043] More preferably, a recombinant AAV vector according to the invention comprises a capsid protein shell of AAV serotype 2 and the AAV genome or ITRs present in said vector are derived from AAV serotype 8; such vector is referred to as an AAV 2/8 vector.

[0044] More preferably, a recombinant AAV vector according to the invention comprises a capsid protein shell of AAV serotype 2 and the AAV genome or ITRs present in said vector are derived from AAV serotype 9; such vector is referred to as an AAV 2/9 vector.

[0045] More preferably, a recombinant AAV vector according to the invention comprises a capsid protein shell of AAV serotype 2 and the AAV genome or ITRs present in said vector are derived from AAV serotype 2; such vector is referred to as an AAV 2/2 vector.

[0046] A nucleic acid molecule encoding an ASO according to the invention represented by a nucleic acid sequence of choice is preferably inserted between the AAV genome or ITR sequences as identified above, for example an expression construct comprising an expression regulatory element operably linked to a coding sequence and a 3′ termination sequence.

[0047] “AAV helper functions” generally refers to the corresponding AAV functions required for AAV replication and packaging supplied to the AAV vector in trans. AAV helper functions complement the AAV functions which are missing in the AAV vector, but they lack AAV ITRs (which are provided by the AAV vector genome). AAV helper functions include the two major ORFs of AAV, namely the rep coding region and the cap coding region or functional substantially identical sequences thereof. Rep and Cap regions are well known in the art, see e.g. (Chiorini et al., 1999) or U.S. Pat. No. 5,139,941, incorporated herein by reference. The AAV helper functions can be supplied on an AAV helper construct, which may be a plasmid. Introduction of the helper construct into the host cell can occur e.g. by transformation, transfection, or transduction prior to or concurrently with the introduction of the AAV genome present in the AAV vector as identified herein. The AAV helper constructs according to the invention may thus be chosen such that they produce the desired combination of serotypes for the AAV vector's capsid protein shell on the one hand and for the AAV genome present in said AAV vector replication and packaging on the other hand.

[0048] “AAV helper virus” provides additional functions required for AAV replication and packaging. Suitable AAV helper viruses include adenoviruses, herpes simplex viruses (such as HSV types 1 and 2) and vaccinia viruses. The additional functions provided by the helper virus can also be introduced into the host cell via vectors, as described in U.S. Pat. No. 6,531,456 incorporated herein by reference.

[0049] Preferably, an AAV genome as present in a recombinant AAV vector according to the invention does not comprise any nucleotide sequences encoding viral proteins, such as the rep (replication) or cap (capsid) genes of AAV. An AAV genome may further comprise a marker or reporter gene, such as a gene for example encoding an antibiotic resistance gene, a fluorescent protein (e.g. gfp) or a gene encoding a chemically, enzymatically or otherwise detectable and/or selectable product (e.g. lacZ, aph, etc.) known in the art.

[0050] A preferred AAV vector according to the invention is an AAV vector, preferably an AAV2/5, AAV2/8, AAV2/9 or AAV2/2 vector, carrying an ASO for skipping exons 39 and 40 according to the invention that is an ASO that comprises, or preferably consists of, a sequence that is:
[0051] complementary or substantially complementary to a nucleotide sequence consisting of SEQ ID NO 1, preferably selected from the group consisting of SEQ ID NO: 2, SEQ ID NO: 3 and SEQ ID NO: 4, preferably selected from the group consisting of SEQ ID NO: 5 and SEQ ID NO:6, preferably selected from the group consisting of SEQ ID NO: 7 and SEQ ID NO:8 or a part thereof.

[0052] Even more preferably, the ASO comprises or consists of a polynucleotide with a nucleotide sequence selected from the group consisting of SEQ ID NO: 9 and 10.

[0053] Improvements in means for providing an individual or a cell, tissue, organ of said individual with an antisense oligonucleotide for skipping exons 39-40 according to the invention, are anticipated considering the progress that has already thus far been achieved. Such future improvements may of course be incorporated to achieve the mentioned effect on restructuring of mRNA using a method according to the invention.

[0054] Alternatively, a preferred delivery method for an antisense oligonucleotide for skipping exons 39-40 as described herein or a plasmid for expression of such ASO is a viral vector or are nanoparticles. In certain embodiments, the preferred delivery method for an ASO as described herein is by use of slow-release or sustained release capsules. In certain embodiments, the preferred delivery method for an ASO as described herein is by use of hydrogels (such as described in WO1993/01286).

[0055] Alternatively, a preferred delivery method for an antisense oligonucleotide or a plasmid for antisense oligonucleotide expression is a viral vector or nanoparticles. Preferably viral vectors or nanoparticles are delivered to retina or inner ear cells. Such delivery to retina or inner ear cells or other relevant cells may be in vivo, in vitro or ex vivo.

[0056] Alternatively, a plasmid can be provided by transfection using known transfection agentia. For intravenous, subcutaneous, intramuscular, intrathecal and/or intraventricular administration it is preferred that the solution is a physiological salt solution. Particularly preferred in the invention is the use of an excipient or transfection agentia that will aid in delivery of each of the constituents as defined herein to a cell and/or into a cell, preferably a retina cell. Preferred are excipients or transfection agentia capable of forming complexes, nanoparticles, micelles, vesicles and/or liposomes that deliver each constituent as defined herein, complexed or trapped in a vesicle or liposome through a cell membrane. Many of these excipients are known in the art. Suitable excipients or transfection agentia comprise polyethylenimine (PEI; ExGen500 (MBI Fermentas)), LipofectAMINE™ 2000 (Invitrogen) or derivatives thereof, or similar cationic polymers, including polypropyleneimine or polyethylenimine copolymers (PECs) and derivatives, synthetic amphiphils (SAINT-18), Lipofectin™, DOTAP and/or viral capsid proteins that are capable of self assembly into particles that can deliver each constitutent as defined herein to a cell, preferably a retina cell. Such excipients have been shown to efficiently deliver an oligonucleotide such as antisense nucleic acids to a wide variety of cultured cells, including retina cells. Their high transfection potential is combined with an excepted low to moderate toxicity in terms of overall cell survival. The ease of structural modification can be used to allow further modifications and the analysis of their further (in vivo) nucleic acid transfer characteristics and toxicity.

[0057] Lipofectin represents an example of a liposomal transfection agent. It consists of two lipid components, a cationic lipid N-[1-(2,3 dioleoyloxy) propyl]-N, N, N-trimethylammonium chloride (DOTMA) (cp. DOTAP which is the methylsulfate salt) and a neutral lipid dioleoylphosphatidylethanolamine (DOPE). The neutral component mediates the intracellular release. Another group of delivery systems are polymeric nanoparticles.

[0058] Polycations such as diethylaminoethylaminoethyl (DEAE)-dextran, which are well known as DNA transfection reagent can be combined with butylcyanoacrylate (PBCA) and hexylcyanoacrylate (PHCA) to formulate cationic nanoparticles that can deliver each constituent as defined herein, preferably an oligonucleotide, across cell membranes into cells.

[0059] In addition to these common nanoparticle materials, the cationic peptide protamine offers an alternative approach to formulate an oligonucleotide with colloids. This colloidal nanoparticle system can form so called proticles, which can be prepared by a simple self-assembly process to package and mediate intracellular release of an oligonucleotide. The skilled person may select and adapt any of the above or other commercially available alternative excipients and delivery systems to package and deliver an exon skipping molecule for use in the current invention to deliver it for the prevention, treatment or delay of a USH2A related disease or condition. “Prevention, treatment or delay of a USH2A related disease or condition” is herein preferably defined as preventing, halting, ceasing the progression of, or reversing partial or complete visual impairment or blindness, as well as preventing, halting, ceasing the progression of or reversing partial or complete auditory impairment or deafness that is caused by a genetic defect in the USH2A gene.

[0060] An antisense oligonucleotide can be linked to a moiety that enhances uptake of the antisense oligonucleotide in cells, preferably retina cells. Examples of such moieties are cholesterols, carbohydrates, vitamins, biotin, lipids, phospholipids, cell-penetrating peptides including but not limited to antennapedia, TAT, transportan and positively charged amino acids such as oligoarginine, poly-arginine, oligolysine or polylysine, antigen-binding domains such as provided by an antibody, a Fab fragment of an antibody, or a single chain antigen binding domain such as a cameloid single domain antigen-binding domain.

[0061] In addition, each antisense oligonucleotide within the set of antisense oligonucleotides according to the invention could be covalently or non-covalently linked to a targeting ligand specifically designed to facilitate the uptake into the cell, cytoplasm and/or its nucleus. Such ligand could comprise (i) a compound (including but not limited to peptide(-like) structures) recognising cell, tissue or organ specific elements facilitating cellular uptake and/or (ii) a chemical compound able to facilitate the uptake in to cells and/or the intracellular release of an oligonucleotide from vesicles, e.g. endosomes or lysosomes.

[0062] Therefore, in a preferred embodiment, the set of antisense oligonucleotides for skipping exons 39 and 40 according to the invention according to the invention is formulated in a composition or a medicament or a composition, which is provided with at least an excipient and/or a targeting ligand for delivery and/or a delivery device thereof to a cell and/or enhancing its intracellular delivery.

[0063] It is to be understood that if a composition comprises an additional constituent such as an adjunct compound as later defined herein, each constituent of the composition may not be formulated in one single combination or composition or preparation. Depending on their identity, the skilled person will know which type of formulation is the most appropriate for each constituent as defined herein. In a preferred embodiment, the invention provides a composition or a preparation which is in the form of a kit of parts comprising an exon skipping molecule according to the invention and a further adjunct compound as later defined herein.

[0064] If required, the set of antisense oligonucleotides for skipping exons 39 and 40 according to the invention or the vector, preferably viral vector of the invention, can be incorporated into a pharmaceutically active mixture by adding a pharmaceutically acceptable carrier.

[0065] Accordingly, the invention also provides a composition, preferably a pharmaceutical composition, comprising the set of antisense oligonucleotides for skipping exons 39 and 40 according to the invention, or a viral vector according to the invention and a pharmaceutically acceptable excipient. Such composition may comprise at least two, at least three or at least four antisense oligonucleotides, or at least two, at least three or at least four viral vectors according to the invention. Such a pharmaceutical composition may comprise any pharmaceutically acceptable excipient, including a carrier, filler, preservative, adjuvant, solubilizer and/or diluent. Such pharmaceutically acceptable carrier, filler, preservative, adjuvant, solubilizer and/or diluent may for instance be found in Remington, 2000. Each feature of said composition has earlier been defined herein.

[0066] In certain embodiments, the pharmaceutical composition as described herein is administered through intravitreal or intratympanic administration. For delivery to the brain or pineal gland intrathecal injections or systemic delivery is also considered. Concentration or dose defined herein may refer to the total concentration or dose of all oligonucleotides used or the concentration or dose of each exon skipping molecule used or added. Therefore in one embodiment, there is provided a composition wherein each or the total amount of antisense oligonucleotides according to the invention used is dosed in an amount ranged from 0.01 and 30 mg/kg, preferably from 0.05 and 30 mg/kg. A suitable intravitreal dose would be between 0.05 mg and 5 mg, preferably between 0.1 and 1 mg per eye, such as about per eye: 0.1, 0.2, 0.3, 0.4, 0.5, 0.6, 0.7, 0.8, 0.9 or 1.0 mg. A suitable in intratympanic dose would be between 0.1 mg and 30 mg, preferably between 0.1 and 15 mg per ear, such as about: 0.1, 0.2, 0.3, 0.4, 0.5, 0.6, 0.7, 0.8, 0.9, 1.0, 2.0, 3.0, 4.0, 5.0, 6.0, 7.0, 8.0, 9.0, 10.0, 11.0, 12.0, 13.0, 14.0, or 15.0 mg per ear.

[0067] Preferably, the set of antisense oligonucleotides for skipping exons 39 and 40 according to the invention, the vector as described herein and the pharmaceutical composition as described herein is for use in the treatment of a USH2A related disease or condition of an individual. In all embodiments of the invention, the term “treatment” is understood to include the prevention and/or delay of the USH2A-related disease or condition. An individual, which may be treated using an antisense oligonucleotide for skipping exons 39-40 according to the invention, the vector as described herein and the pharmaceutical composition as described herein may already have been diagnosed as having a USH2A-related disease or condition.

[0068] Alternatively, an individual which may be treated using the set of antisense oligonucleotides for skipping exons 39 and 40 according to the invention may not have yet been diagnosed as having a USH2A-related disease or condition but may be an individual having an increased risk of developing a USH2A-related disease or condition in the future given his or her genetic background. A preferred individual is a human being. In a preferred embodiment the USH2A-related disease or condition is Usher Syndrome type 2.

[0069] Accordingly, the invention further provides a set of antisense oligonucleotides for skipping exons 39 and 40 according to the invention, or a viral vector according to the invention, or a composition according to the invention for use as a medicament, for treating a USH2A-related disease or condition requiring modulating splicing of USH2A and for use as a medicament for the prevention, treatment or delay of a USH2A-related disease or condition. A preferred USH2A-related disease or condition is Usher Syndrome type 2.

[0070] The invention further provides the use of a set of antisense oligonucleotide for skipping exons 39 and 40 according to the invention, or of a viral vector according to the invention, or a composition according to the invention for the treatment of a USH2A-related disease or condition requiring modulating splicing of USH2A. In a preferred embodiment the USH2A-related disease or condition is USH2A-associated Retinitis pigmentosa (RP).

[0071] The invention further provides the use of a set of antisense oligonucleotide for skipping exons 39 and 40 according to the invention, or of a viral vector according to the invention, or a composition according to the invention for the preparation of a medicament, for the preparation of a medicament for treating a USH2A-related disease or condition requiring modulating splicing of USH2A and for the preparation of a medicament for the prevention, treatment or delay of a USH2A-related disease or condition. A preferred USH2A-related disease or condition is Usher Syndrome type 2. Therefore in a further aspect, there is provided the use of a set of antisense oligonucleotide for skipping exons 39 and 40, viral vector or composition as defined herein for the preparation of a medicament, for the preparation of a medicament for treating a condition requiring modulating splicing of USH2A and for the preparation of a medicament for the prevention, treatment or delay of a USH2A-related disease or condition. A preferred USH2A-related disease or condition is USH2A-associated Retinitis pigmentosa (RP).

[0072] A treatment in a use or in a method according to the invention is at least once, lasts one week, one month, several months, one year, 2, 3, 4, 5, 6 years or longer, such as lifelong. Each antisense oligonucleotide for skipping exons 39 and 40 or equivalent thereof as defined herein for use according to the invention may be suitable for direct administration to a cell, tissue and/or an organ in vivo of individuals already affected or at risk of developing USH2A-related disease or condition, and may be administered directly in vivo, ex vivo or in vitro. The frequency of administration of an oligonucleotide, composition, compound or adjunct compound of the invention may depend on several parameters such as the severity of the disease, the age of the patient, the mutation of the patient, the number of antisense oligonucleotides (i.e. dose), the formulation of antisense oligonucleotides, the route of administration and so forth. The frequency may vary between daily, weekly, at least once in two weeks, or three weeks or four weeks or five weeks or a longer time period.

[0073] Dose ranges of oligonucleotides according to the invention are preferably designed on the basis of rising dose studies in clinical trials (in vivo use) for which rigorous protocol requirements exist. An oligonucleotide as defined herein, may be used at a dose which is ranged from 0.01 and 20 mg/kg, preferably from 0.05 and 20 mg/kg. A suitable intravitreal or intratympanic dose would be between 0.05 mg and 5 mg, preferably between 0.1 and 1 mg per eye or per ear, such as about per eye: 0.1, 0.2, 0.3, 0.4, 0.5, 0.6, 0.7, 0.8, 0.9 or 1.0 mg.

[0074] In a preferred embodiment, a concentration of an oligonucleotide as defined herein, which is ranged from 0.1 nM and 1 μM is used. Preferably, this range is for in vitro use in a cellular model such as retina or cochlear cells or retinal or cochlear tissue. More preferably, the concentration used is ranged from 1 to 400 nM, even more preferably from 10 to 200 nM, even more preferably from 50 to 100 nM. If several oligonucleotides are used, this concentration or dose may refer to the total concentration or dose of oligonucleotides or the concentration or dose of each oligonucleotide added.

[0075] In a preferred embodiment, a viral vector, preferably an AAV vector as described earlier herein, as delivery vehicle for a oligonucleotide according to the invention, is administered in a dose ranging from 1×10⁹-1×10¹⁷ virus particles per injection, more preferably from 1×10¹⁰-1×10¹² virus particles per injection.

[0076] The ranges of concentration or dose of oligonucleotide(s) as given above are preferred concentrations or doses for in vivo, in vitro or ex vivo uses. The skilled person will understand that depending on the oligonucleotide(s) used, the target cell to be treated, the gene target and its expression levels, the medium used and the transfection and incubation conditions, the concentration or dose of oligonucleotide(s) used may further vary and may need to be optimized any further.

[0077] The set of antisense oligonucleotide for skipping exons 39 and 40 according to the invention, or a viral vector according to the invention, or a composition according to the invention for use according to the invention may be suitable for administration to a cell, tissue and/or an organ in vivo of individuals already affected or at risk of developing a USH2A-related disease or condition, and may be administered in vivo, ex vivo or in vitro. The set of antisense oligonucleotide for skipping exons 39 and 40 according to the invention, or a viral vector according to the invention, or a composition according to the invention may be directly or indirectly administered to a cell, tissue and/or an organ in vivo of an individual already affected by or at risk of developing a USH2A-related disease or condition, and may be administered directly or indirectly in vivo, ex vivo or in vitro. As Usher Syndrome type 2 has a pronounced phenotype in retina and inner ear cells, it is preferred that said cells are retina or inner ear cells, it is further preferred that said tissue is the retina or the inner ear and/or it is further preferred that said organ comprises or consists of the eye or the ear.

[0078] The invention further provides a method for modulating splicing of USH2A in a cell comprising contacting the cell, preferably a retina cell, with a set of antisense oligonucleotide for skipping exons 39 and 40 according to the invention, or a viral vector according to the invention, or a composition according to the invention. The features of this aspect are preferably those defined earlier herein. Contacting the cell with an exon skipping molecule according to the invention, or a viral vector according to the invention, or a composition according to the invention may be performed by any method known by the person skilled in the art. Use of the methods for delivery of the set of antisense oligonucleotide for skipping exons 39 and 40, viral vectors and compositions described herein is included. Contacting may be directly or indirectly and may be in vivo, ex vivo or in vitro.

[0079] The invention further provides a method for the treatment of a USH2A-related disease or condition requiring modulating splicing of USH2A of an individual in need thereof, said method comprising contacting a cell, preferably a retina cell or cochlear cell, of said individual with a set of antisense oligonucleotide for skipping exons 39 and 40 according to the invention, or a viral vector according to the invention, or a composition according to the invention. The features of this aspect are preferably those defined earlier herein. Contacting the cell, preferably a retina cell or a cochlear cell with a set of oligonucleotides according to the invention, or a viral vector according to the invention, or a composition according to the invention may be performed by any method known by the person skilled in the art. Use of the methods for delivery of molecules, viral vectors and compositions described herein is included. Contacting may be directly or indirectly and may be in vivo, ex vivo or in vitro.

[0080] In yet another aspect, the invention provides for the use of the set of antisense oligonucleotides for skipping exons 39 and 40 according to the invention, or a viral vector according to the invention, or a composition according to the invention for treating an USH2A-related disease or a condition requiring modulating splicing of USH2A.

[0081] Unless otherwise indicated each embodiment as described herein may be combined with another embodiment as described herein.

[0082] In this document and in its claims, the verb “to comprise” and its conjugations is used in its non-limiting sense to mean that items following the word are included, but items not specifically mentioned are not excluded. In addition, reference to an element by the indefinite article “a” or “an” does not exclude the possibility that more than one of the element is present, unless the context clearly requires that there be one and only one of the elements. The indefinite article “a” or “an” thus usually means “at least one”.

[0083] The word “about” or “approximately” when used in association with a numerical value (e.g. about 10) preferably means that the value may be the given value (of 10) more or less 5% of the value.

[0084] The sequence information as provided herein should not be so narrowly construed as to require inclusion of erroneously identified bases. The skilled person is capable of identifying such erroneously identified bases and knows how to correct for such errors.

[0085] All patent and literature references cited in the present specification are hereby incorporated by reference in their entirety.

### DESCRIPTION OF THE FIGURES

[0086] FIG. 1: Overview of target sites for the designed antisense oligonucleotides (ASOs). ASOs that specifically induce skipping of (A) USH2A exon 39 or (B) USH2A exon 40 were designed. ASOs target either the intron-exon boundaries, or known exonic splicing enhancer (ESE) motifs within the exons. Splicing Enhancer Matrices and Splicing Silencer Matrices were assessed and visualized using the ‘Human Splicing Finder’ website (www.umd.be/HSF3/).

[0087] FIG. 2: Generation of the minigene splice vectors. The genomic region containing USH2A exons 39-40 and flanking sequences were cloned into the pCI-Neo Rho destination vector. This resulted in a minigene splice vector which contains the fragments of interest flanked by two rhodopsin exons under the control of a CMV promotor. pDEST pCI-Neo Rho: pCI-Neo Rho destination vector.

[0088] FIG. 3: In silico modeling of usherin protein domain architecture after exon 39-40 skipping. (A) Schematic representation of the domain architecture of the large protein isoform of human and zebrafish usherin. The large protein isoforms of human and zebrafish usherin are comprised of the same repetitive protein domain architecture that includes a signal peptide, a laminin G-like domain (LamG-like), a laminin N-terminal domain (LamNT), 10 EGF-like motifs, four fibronectin type III (FN3) domains, two laminin G domains (LamG), 28 additional FN3 domains, one transmembrane domain and a short intracellular region with a C-terminal class I PDZ binding motif. Skipping of USH2A exons 39-40 results in the absence of one FN3 domain. The domain that is lost in human and zebrafish usherin is indicated with a dashed box. Numbers indicate amino acids. (B) 3D homology modeling of USH2A exons 39-40 skipping predicts the removal of exactly one FN3 domain without disturbing the folding of neighboring FN3 domains. The amino acids that are encoded by targeted exons are depicted in dark gray.

[0089] FIG. 4: Design and characterization of the ush2a^{Δexon39-40} zebrafish line. (A) Schematic representation of the exon excision approach. Sanger sequencing confirmed the presence of the anticipated excision in injected embryos (1 day post fertilization (dpf)). (B) RT-PCR analysis revealed the absence of ush2a exons 39 and 40 in ush2a^{Δexon39-40} larvae (5 days post fertilization (dpf)). Sanger sequencing of the ush2a^{Δexon39-40} amplicon confirmed the absence of the target exons from the transcript.

[0090] FIG. 5: Visualization of usherin proteins on retinal sections of wild-type, ush2a^{rmc1} and ush2a^{Δexon39-40} zebrafish. (A) Retinal cryosections of wild-type, ush2a^{rmc1} and ush2a^{Δexon39-40} larvae (5 days post fertilization (dpf)) stained with antibodies directed against usherin and centrin. Nuclei are counterstained with DAPI. No usherin signal was detected in ush2a^{rmc1} zebrafish retinas, whereas in the retinas of wild-type and ush2a^{Δexon39-40} larvae usherin was present at the photoreceptor periciliary region, in close proximity to centrin. Scale bar: 10 μm. OS: outer segment, CC: connecting cilium, IS: inner segment, ONL: outer nuclear layer. (B) Quantification of anti-usherin signal intensity at the periciliary region. Individual data points represent the mean fluorescence intensity of anti-usherin staining at the periciliary region of all photoreceptors of a single, central section of one larval zebrafish eye. Horizonal bars depict the mean signal intensity within a genotype (n=25-28 eyes). Data were analyzed using one-way ANOVA followed by Tukey's multiple comparison test. *P≤0.05. ****P≤0.0001.

[0091] FIG. 6: Visualization of Adgrv1 proteins on retinal sections of wild-type, ush2a^{rmc1} and ush2a^{Δexon39-40} zebrafish. (A) Retinal cryosections of wild-type, ush2a^{rmc1} and ush2a^{Δexon39-40} larvae (5 days post fertilization (dpf)) stained with antibodies directed against Adgrv1 and centrin. Nuclei are counterstained with DAPI. A reduced Adgrv1 signal was detected in ush2a^{rmc1} zebrafish retinas, whereas in the retinas of wild-type and ush2a^{Δexon39-40} larvae usherin was more abundantly present at the photoreceptor periciliary region, in close proximity to centrin. Scale bar: 10 μm. OS: outer segment, CC: connecting cilium, IS: inner segment, ONL: outer nuclear layer. (B) Quantification of anti-Adgrv1 signal intensity at the periciliary region. Individual data points represent the mean fluorescence intensity of anti-Adgrv1 staining at the periciliary region of all photoreceptors of a single, central section of one larval zebrafish eye. Horizonal bars depict the mean signal intensity within a genotype (n=27-28 eyes). Data were analyzed using one-way ANOVA followed by Tukey's multiple comparison test. ****P≤0.0001.

[0092] FIG. 7: Immunohistochemistry on retinal sections of wild-type, ush2a^{rmc1} and ush2a^{Δexon39-40} zebrafish. (A) Retinal cryosections of 6 days post fertilization (dpf) were analyzed for rhodopsin localization. Nuclei were counterstained with DAPI. In the retinas of wild-type and ush2a^{Δexon39-40} larvae rhodopsin was predominantly present in the photoreceptor outer segments, whereas in ush2a^{rmc1} zebrafish retinas rhodopsin signal was also detected in the photoreceptor cell body as indicated by arrowheads. Scale bar: 10 μm. ROS: rod outer segment, ONL: outer nuclear layer, INL: inner nuclear layer. (B) Scatterplot of detected photoreceptor cells with aberrant rhodopsin localization in 6 dpf zebrafish obtained by manual counting and plotted per counted eye (n=12-14). Horizonal bars depict the mean signal intensity within a genotype. The amount of cells with aberrant rhodopsin localization is significantly lower in wild-type and ush2a^{Δexon39-40} retinas as compared to ush2a^{rmc1} retinas. Data were analyzed using one-way ANOVA followed by Tukey's multiple comparison test. *P≤0.05. **P≤0.01.

[0093] FIG. 8: ASOs induce a dose-dependent skipping of USH2A target exons. HEK293T cells are co-transfected with the USH2A exons 39-40 minigene vector and different concentrations of ASOs targeting (A) USH2A exon 39, (B) USH2A exon 40 or (C) USH2A exon 39 and USH2A exon 40. Each transfection resulted in an increase in exon skipped transcripts with increasing concentrations of ASO. Non-skipped amplicons and amplicons in which the targeted USH2A exon is skipped are indicated adjacent to the gel image. GAPDH amplification is shown as a loading control. ASO: antisense oligonucleotide; mmASO: mismatch ASO; PCR(−): negative PCR control.

[0094] FIG. 9: Validation of ASO-induced dual exon skipping for USH2A exons 39-40 in WERI-Rb-1 cells. Co-transfection of WERI-Rb-1 cells with ASOs targeting USH2A exons 39 and 40 resulted in the combined skipping of the exons of interest, without the induction of clear aberrant ASO-induced splice effects. GAPDH amplification is shown as a loading control. ASO: antisense oligonucleotide; mmASO: mismatch ASO; PCR(−): negative PCR control.

### DESCRIPTION OF THE SEQUENCES

TABLE 1
Sequences

| SEQ ID NO: | Name |
|---|---|
| 1 | USH2A genomic DNA wild-type |
| 2 | USH2A exon 39-40 and flanking genomic sequence |
| 3 | USH2A exon 39 sequence |
| 4 | USH2A exon 40 sequence |
| 5 | ASO_39 target site and flanking sequences (+10 nt) |
| 6 | ASO_40 target site and flanking sequences (+10 nt) |
| 7 | ASO_39 target site and flanking sequences (+5 nt) |
| 8 | ASO_40 target site and flanking sequences (+5 nt) |
| 9 | ASO_39 |
| 10 | ASO_40 |
| 11 | T7 promoter sequence |
| 12 | Region complementary to constant oligo |
| 13 | constant oligo |
| 14 | target-specific oligo 5′ ush2a^{Δexo39-40} |
| 15 | target-specific oligo 3′ ush2a^{Δexo39-40} |
| 16 | ush2a wild-type forward primer |
| 17 | ush2a wild-type reverse primer |
| 18 | ush2a Δexon39-40 forward primer |
| 19 | ush2a Δexon39-40 reverse primer |
| 20 | ush2a exon 37-42 forward primer |
| 21 | ush2a exon 37-42 reverse primer |
| 22 | USH2A intron 38-40 forward primer |
| 23 | USH2A intron 38-40 reverse primer |
| 24 | Rho exon 3-5 forward primer |
| 25 | Rho exon 3-5 reverse primer |
| 26 | ush2a exon 37-42 forward primer |
| 27 | ush2a exon 37-42 reverse primer |
| 28 | GAPDH forward primer |
| 29 | GAPDH reverse primer |
| 30 | mmASO_39 |
| 31 | mmASO_40 |

### EXAMPLES

[0095] In this study, we explored dual exon skipping as a future treatment option for patients with RP caused by mutations in the USH2A gene. Based on in silico protein analysis, and the reported presence of multiple RP-associated protein-truncating mutations, we opted to target exons 39-40 of human USH2A. Calculations based on available carrier frequencies in the general population for the various reported pathogenic variants in USH2A exons 39-40 (gnomAD v2.1.1) indicate that ˜9,500 individuals worldwide suffer from USH2A-associated disease caused by (a) variant(s) in these exons. Skipping of this combination of exons is predicted to result in a transcript encoding a shortened usherin protein that lacks exactly one of the repetitive fibronectin type III (FN3) domains. To model the functional consequences of our exon skipping approach, we employed CRISPR/Cas9 and excised the orthologous target exons from the zebrafish genome. This resulted in the ush2a^{Δexon39-40} zebrafish line in which usherin protein expression was restored in photoreceptors, and in which the localization of rhodopsin to the photoreceptor outer segment was rescued. To translate these findings into a future treatment in man, we identified and in vitro validated ASOs with a high, sequence-specific dual exon skipping potential. Together, our data suggest that a carefully designed dual exon skipping approach, in which two exons remove a single protein domain, could be highly promising as a future treatment option for USH2A-associated RP.

### Materials and Methods

### Zebrafish Ethics, Maintenance and Husbandry

[0096] Animal experiments were conducted in accordance with the Dutch guidelines for the care and use of laboratory animals (Wet op de Dierproeven 1996) and European regulations (Directive 86/609/EEC), as approved by the Dutch Ethics committee of the Central Committee Animal Experimentation (Centrale Commissie Dierproeven [CCD]; Protocol #RU-DEC2016-0091). Wild-type Tupfel Longfin (TL) zebrafish and the previously described ush2a^{rmc1} mutants (c.2337_2342delinsAC; p.Cys780GInfsTer32) were used. Zebrafish were maintained and raised according to standard methods. Both adult and larval zebrafish were kept at a light-dark regime of 14 hours of light and 10 hours of darkness. Adult zebrafish were daily fed twice with Gemma Micro 300 dry pellets (#13177, Zebcare, Nederweert, The Netherlands) at ˜5% body weight and once with artemia. Embryos were obtained from natural spawning.

### Multiple Sequence Alignment

[0097] A multiple sequence alignment of the human usherin protein (ENSP00000305941_3) and zebrafish usherin protein (ENSDARP00000080636_3) was generated using AlignX in the Vector NTI software package (Vector NTI Advance 11).

[0098] In silico modeling of the effect of USH2A exons 39-40 skipping on FN3 protein domain structure The 5202 amino acid usherin protein sequence was selected from the UniProtKB database (www.uniprot.org/; acc. #075445) and was used as template protein sequence for modeling the effect of USH2A exons 39-40 skipping on the 3D protein domain structure of usherin. The effect of USH2A exons 39-40 skipping on the usherin protein structure was modeled in a chain of three consecutive fibronectin type III (FN3) domains. For prediction of the wild-type protein structure FN3_10, FN3_11 and FN3_12 were included, of which FN3_11 is encoded by USH2A exons 39-40. The structural model of usherin^{Δexon39-40} included FN3_10, FN3_11 and FN3_13. The AlphaFold2 (previously described) modeling script was used to generate the structural models of both wild-type and usherin^{Δexon39-40} proteins by employing standard parameters.

### CRISPR/Cas9 Genome-Editing Design

[0099] Target sites for single guide RNAs (sgRNAs) to cleave in introns 38 and 40 of zebrafish ush2a (NCBI accession XM_009293147.3) were identified with the online web tool CHOPCHOP. sgRNAs for which no off-target sites were predicted and which had the highest predicted efficiency score were selected for synthesis. Synthesis of sgRNAs was performed as described previously. In brief, templates for in vitro sgRNA transcription were generated by annealing a constant oligonucleotide encoding the reverse complement of the tracrRNA tail to a target-specific oligonucleotides containing the T7 promoter sequence (5′-TAATACGACTCACTATA-3′-SEQ ID NO: 11), the 20-base target sequence, and a region (5′-GTTTTAGAGCTAGAAATAGCAAG-3′-SEQ ID NO: 12) complementary to the constant oligonucleotide. Phusion™ High-Fidelity DNA Polymerase (#M0530L, New England Biolabs, Ipswich, MA, USA) was used to fill the ssDNA overhang after which the template was purified using the GenElute™ PCR clean-up kit (#NA1020-1KT, Sigma-Aldrich, St. Louis, MO, USA). The template was used for the in vitro transcription of the sgRNAs using the T7 MEGAshortscript™ Kit (#AM1354, Thermo Fisher Scientific, Waltham, MA, USA). Obtained transcripts were purified using the MEGAclear™ Transcription Clean-Up Kit (#AM1908, Thermo Fisher Scientific, Waltham, MA, USA). Oligonucleotides used for sgRNA synthesis are listed in Table 2.

TABLE 2
Oligonucleotide sequences used for sgRNA synthesis.

| Oligo Name | Sequence (5′ > 3′) | SEQ ID NO |
|---|---|---|
| constant oligo | AAAAGCACCGACTCGGTGCCACTTTTTCAAGTTGATAA | 13 |
| | CGGACTAGCCTTATTTTAACTTGCTATTTCTAGCTCTA | |
| | AAAC | |
| target-specific | CCGCTAGCTAATACGACTCACTATAGGGACAGAAGC | 14 |
| oligo 5′ | GAGGGTCTGGTTTTAGAGCTAGAAATAGCAAG | |
| ush2a^{Δexo39-40} | | |
| target-specific | CCGCTAGCTAATACGACTCACTATAGGGGTGATGACT | 15 |
| oligo 3′ | TTGAGAACGTTTTAGAGCTAGAAATAGCAAG | |
| ush2a^{Δexo39-40} | | |

T7 promoter sequence in bold. Gene specific region in italics. Overlapping regions of the constant and target-specific oligonucleotides are underlined.

### Microinjections

[0100] For the generation of the ush2a^{Δexon39-40} zebrafish (deposited as ush2^{armc17} in ZFIN), the 5′ sgRNA, 3′ sgRNA and commercial Alt-R® S.p. Cas9 Nuclease V3 (#1081059, IDT, Newark, NJ, USA) were co-injected. To avoid preferential in vivo binding of Cas9 to either sgRNA, individual sgRNA-Cas9 complexes were prepared and mixed together prior to injection. For this, the individual mixtures were incubated at 37° C. for 5 minutes after which they were combined. The final injection mix contained 80 ng/μl 3′ sgRNA, 80 ng/μl 5′ sgRNA, 800 ng/μl Cas9 protein, 0.2 M KCl and 0.05% phenol red. Injection needles (#TW120F-3, World Precision Instruments, Friedberg, Germany) were prepared using a micropipette puller (Model P-97, Sutter Instrument Company, Novato, CA, USA). Wild-type zebrafish embryos were collected after natural spawning and injected at the single cell stage with 1 nl of injection mixture using a Pneumatic PicoPump (#SYS-PV820, World Precision Instruments, Friedberg, Germany). After injection, embryos were raised at 28.5° C. in E3 embryo medium (5 mM NaCl, 0.17 mM KCl, 0.33 mM CaCI2, and 0.33 mM MgSO4) supplemented with 0.1% (v/v) methylene blue. At 1 day post fertilization (dpf), part of the injected embryos was analyzed for the presence of the anticipated exon deletion using genomic PCR analysis. The remainder of the injected embryos were raised to adulthood.

### Genotyping

[0101] Genomic DNA was extracted from whole larvae (1 dpf) or caudal fin tissue from adult zebrafish. Tissue was lysed in 25 μl (larvae) or 75 μl (fin tissue) lysis buffer (40 mM NaOH, 0.2 mM EDTA) at 95° C. for 20 minutes. The lysed samples were neutralized with 10% 1M TRIS-HCl (pH 7.5) and diluted 10 times with milli-Q water. 1 μl of diluted sample was used as a template in PCR reactions to amplify the zebrafish ush2a^{Δexon39-40} allele and the corresponding wild-type zebrafish ush2a allele. For PCR analysis, the Q5 High-Fidelity DNA Polymerase kit (#M0491L, New England Biolabs, Ipswich, MA, USA) was employed. All primer sequences are listed in Table 1 (SEQ ID NO 16-29). The presence or absence of the ush2a^{Δexon39-40} allele was confirmed by Sanger sequencing.

### Immunohistochemistry, Histology and Quantification of Fluorescent Signal Intensity

[0102] Zebrafish ush2a^{Δexon39-40}, ush2a^{rmc1} and strain-matched wild-type larvae (5 dpf) were cryoprotected with 10% sucrose in PBS for 10 minutes prior to embedding in OCT compound (Tissue-Tek, #4583, Sakura, Alphen aan den Rijn, The Netherlands). After embedding, samples were snap frozen in liquid nitrogen-cooled isopentane and sectioned following standard protocols. Cryosections (7 μm thickness along the lens/optic nerve axis) were rinsed with PBS, permeabilized for 20 minutes with 0.01% Tween-20 in PBS and blocked for 1 hour with blocking buffer (10% normal goat serum and 2% bovine serum albumin in PBS). Antibodies diluted in blocking buffer were incubated overnight at 4° C. Secondary antibodies were also diluted in blocking buffer and incubated together with DAPI (1:8000; D1306; Molecular Probes, Eugene, OR, USA) for 1 hour. Sections were post fixed with 4% paraformaldehyde for 10 minutes and mounted with Prolong Gold Anti-fade (P36930; Molecular Probes, Eugene, OR, USA). The following primary antibodies and dilutions were used: rabbit anti-usherin (1:500; #27640002, Novus Biologicals, Centennial, CO, USA), mouse anti-centrin (1:500; #04-1624, Millipore, Burlington, MA, USA) and rabbit anti-Adgrv1 (1:100; #DZ41033, Boster Bio, Pleasanton, CA, USA). Secondary antibodies (Alexa Fluor 568 goat anti-rabbit (#A11011, Thermo Fisher Scientific, Waltham, MA, USA) and Alexa Fluor 647 goat anti-mouse (#A21237, Thermo Fisher Scientific, Waltham, MA, USA)) were used in a 1:800 dilution. Images were taken using a Zeiss Axio Imager fluorescence microscope equipped with an AxioCam MRC5 camera (Zeiss, Jena, Germany). Quantification of the fluorescent signal intensity of anti-usherin and anti-Adgrv1 immunoreactivity was performed using Fiji version (v.) 1.47 software as described previously [15]. Upon identification of the areas of the connecting cilia, the maximum and minimum gray value of usherin or Adgrv1 immunofluorescence in those areas was measured. The difference between those values was calculated for each individual photoreceptor cell after which the mean difference per retina was plotted. All data were analyzed using one-way ANOVA followed by Tukey's multiple comparison test. Statistical significance was set at p<0.05.

[0103] To asses rhodopsin localization in the larval retina, larvae (6 dpf) from homozygous ush2a^{Δexon39-40} ush2a^{rmc1} and strain-matched wild-type controls were sampled 100 minutes post light onset. Larvae were fixed in darkness overnight at 4° C. using 4% paraformaldehyde, dehydrated using methanol series with an ascending concentration, transferred to 100% methanol for an overnight incubation followed by storage at −20° C. Upon embedding, larvae were rehydrated in descending methanol series to 0.1% PBS-Tween-20. Afterwards, larvae were cryoprotected with 10% sucrose in 0.1% PBS-Tween-20 for 15 minutes, followed by an incubation in 30% sucrose in 0.1% PBS-Tween-20 for 1 hour at room temperature. Larvae were then embedded, snap frozen and sectioned as described above. Cryosections were rinsed with PBS, permeabilized for 2 minutes with 0.1% Tween-20 in PBS and, immersed in 10 mM Sodium Citrate at pH 8.5 and heated for 1 min at 121° C. in the autoclave. Cryosections were subsequently washed in 0.1% Tween-20 in PBS and blocked for 1 hour with blocking buffer (10% non-fat dry milk and 0.1% Tween-20 in PBS). Primary antibody (mouse anti-rhodopsin, 1:4000, #NBP2-59690, Novus Biologicals, Centennial, CO, USA) diluted in blocking buffer was incubated overnight at 4° C. Secondary antibody (Alexa Fluor 488 goat anti-mouse, 1:800, #A11029, Thermo Fisher Scientific, Waltham, MA, USA) was also diluted in blocking buffer and incubated together with DAPI (1:8000; #D1306; Thermo Fisher, Waltham, MA, USA) for 1.5 hour. Sections were mounted and images were taken as described above. Rhodopsin levels were quantified by manual counting. For this, all pictures were taken using the same settings after which the mislocalisation spots in the region of interest (outer nuclear layer), blinded and analyzed independently by two individuals. For all pictures mean counts were calculated and analyzed using a one-way ANOVA followed by Tukey's multiple comparison test. Statistical significance was set at p<0.05.

### Antisense Oligonucleotides

[0104] The sequence of USH2A exon 39 and 40 and the 50 bp upstream and downstream flanking intronic sequences were analyzed to identify potential ASO target sites as described previously (Slijkerman, R, Exon Skipping and Inclusion Therapies. 2018, Springer. p. 519-530). (FIG. 1). Briefly, the presence of exonic splice enhancer motifs was assessed using the ‘Human Splicing Finder’ website (www.umd.be/HSF3/; Date accessed: Dec. 16, 2020) and RNA structure and free energy predictions were performed using freely available database tools (www.unafold.org/; http://rna.urmc.rochester.edu/RNAstructureWeb/index.html). ASOs were designed to have a Tm≥48° C., a GC content between 40-60% and a length of 17-23 nt. Subsequently, for each targeted exon, the 3-6 most optimal ASOs were purchased from Eurogentec (Liège, Belgium) containing 2′-O-(2-methoxyethyl) modified ribose groups and a fully phosphorothioated backbone. The matching control ASOs all contain four mismatches relative to the target sequence. All ASOs were dissolved in phosphate-buffered saline (PBS) before use. ASO sequences are listed in Table 3.

TABLE 3
Antisense oligonucleotide sequences and characteristics.

| RNA | | Length | GC content | SEQ |
|---|---|---|---|---|
| oligonucleotide | Sequence (5′ > 3′) | (nt) | (%) | ID NO |
| ASO_39 | CUGGAGUUGGUAUCUGGGA | 19 | 52 | 9 |
| ASO_40 | UAGCUUAACGAUGCAGAAGGAUU | 23 | 39 | 10 |
| mmASO_39 | CUGAAUUUGAUAUCUGAGA | 19 | 52 | 30 |
| mmASO_40 | UAGAUUAAUGAUGCAUAAGUAUU | 23 | 21 | 31 |

ASO: antisense oligonucleotide; mm: mismatch; nt: nucleotide; Mismatches with the target sequence are underlined. All ASO were ordered with 2′-O-(2-methoxyethyl) modified ribose groups and a fully phosphorothioated backbone.

### Minigene Splice Vectors

[0105] The genomic region containing human USH2A exons 39 and 40, together with ˜800 bp of flanking up- and downstream intronic sequence, was cloned into a pDONR201 vector using Gateway cloning technology. Primer sequences are listed in Table 1. The complete insert of the donor vector was sequence verified and subsequently cloned into the pCI-Neo-Rho destination vector, which enables the expression of the fragment of interest flanked by two rhodopsin exons. This resulted in a minigene splice vectors containing human USH2A exon 39 and 40 (FIG. 2).

### Cell Culture

[0106] HEK293T cells were cultured in Dulbecco's modified Eagle's medium (DMEM) (#D0819, Sigma-Aldrich, St. Louis, MO, USA) supplemented with 10% (v/v) fetal bovine serum (#F7524, Sigma-Aldrich, St. Louis, MO, USA), 1% penicillin-streptomycin (#P4333, Sigma-Aldrich, St. Louis, MO, USA) and 1% sodium pyruvate (#S8636, Sigma-Aldrich, St. Louis, MO, USA). Cells were passaged twice per week upon standard trypsinization (#DF0152-15-9, Thermo Fisher Scientific, Waltham, MA, USA). WERI-Rb-1 cells were cultured in RPMI-1640 (#22409-015, Gibco Waltham, MA, USA) supplemented with 15% (v/v) fetal bovine serum ((#F7524, Sigma-Aldrich, St. Louis, MO, USA), 2% HEPES (#H0887, Sigma-Aldrich, St. Louis, MO, USA) and 1% penicillin-streptomycin ((#P4333, Sigma-Aldrich, St. Louis, MO, USA). Cells were cultured in suspension and maintained by addition of fresh medium or replacement of medium every 3 to 4 days.

### Transfection of ASOs and Minigene Splice Vectors in HEK293T Cells

[0107] HEK293T cells were seeded at a concentration of ˜0.2×10⁵ cells per well in a 24-well plate and grown for 24 hours at 37° C. in a total volume of 0.5 ml medium. Cells were (co-)transfected with 500 ng of the minigene splice vector and the indicated amount of ASO, calculated as the final concentration in the culture medium after ASO delivery. The transfection mixture furthermore contained 3 μl Fugene® HD Transfection Reagent (#E2311, Promega, Madison, WI, USA), and was prepared in a final volume of 50 μl Opti-Mem (#31985-047, Gibco Waltham, MA, USA), according to manufacturer's protocol. Two wells per condition were treated. After incubation for 24 hours at 37° C., cells were washed once with PBS and harvested for RNA isolation.

### Transfection of ASOs in WERI-Rb-1 Cells

[0108] Transfections were performed on adherend cells. For this purpose, all wells of a 12-well plate were coated with Poly-L-Lysine (#P4707, Sigma Aldrich, Saint Louis, MO, USA) by adding 0.5 ml Poly-L-Lysine to each well. After a 90-minute incubation at 37° C., Poly-L-Lysine was removed from the wells and wells were washed three times with PBS and air-dried for 30 minutes. Next, WERI-Rb-1 were seeded at a concentration of 1.0×10⁶ cells per well in a 12-well plate and incubated for 48 hours at 37° C. Cells were subsequently transfected with the ASO of interest using Lipofectamine™ 2000 transfection reagent (#11668019, Thermo Fisher Scientific, Waltham, MA, USA) at a 2:1 (volume:weight) ratio between Lipofectamine™ 2000 and ASO. First, individual Lipofectamine™ 2000/Opti-MEM (50 μl) mixtures and an ASO/Opti-MEM (50 μl) mixtures were prepared. Both mixtures were individually incubated at room temperature for 5 minutes. Next, the ASO and Lipofectamine™ mixtures were mixed together and incubated at room temperature for an additional 10 minutes before being added to the cells. After a 24 hour incubation at 37° C., cells were washed once with PBS and harvested for RNA isolation.

RNA Isolation and cDNA Synthesis

[0109] Total RNA was isolated from transfected HEK293T cells or WERI-Rb-1 cells using the Nucleospin RNA II isolation kit (#740955.250, MACHEREY-NAGEL, Düren, Germany), according to manufacturer's protocol, whereas total RNA from zebrafish larvae (5 dpf) was extracted using the RNeasy® Micro kit (#74004, Qiagen, Hilden, Germany). For cDNA synthesis from HEK293T RNA, the iScript™ cDNA synthesis kit (#1708891, Bio-Rad, Hercules, CA, USA) was used with 0.5 μg total RNA as input. From WERI-Rb-1 and zebrafish RNA, cDNA was synthesized using SuperScript™ IV Reverse Transcriptase (#18090010, Thermo Fisher Scientific, Waltham, MA, USA), combined with an oligo (dT) 12-18 primer (#18418012, Thermo Fisher Scientific, Waltham, MA, USA), according to manufacturer's protocol.

### Transcript Analysis

[0110] For the exon skipping experiments using the minigene splice vectors, the target region was amplified from the synthesized cDNA using Taq polymerase (New England Biolabs, M0491L, Ipswich, MA) and a forward primer and reverse primer located in exons 3 and 5 of the human RHO gene, respectively. For the experiments in WERI-Rb-1 cells and zebrafish larvae, the target region was amplified from the synthesized human or zebrafish cDNA using Q5@ High-Fidelity DNA Polymerase (#M0491L, New England Biolabs, Ipswich, MA, USA). For the exon skipping experiments in HEK293T cells and WERI-Rb-1 cells, primers amplifying GAPDH using Taq polymerase (New England Biolabs, M0491L, Ipswich, MA) were employed as a control. All primer sequences are listed in Table 1 (SEQ ID NO: 16-29). Amplified fragments were separated on a 1% agarose gel and sequence-verified by Sanger sequencing.

### Results

### USH2A Exons 39-40 is a Promising Target for Exon Skipping

[0111] USH2A exons 39 and 40 (294 nucleotides) encode exactly one fibronectin type III (FN3) domain. In addition, numerous unique loss-off-function mutations have been reported in those exons, making them important targets for exon skipping (USH2A LOVD mutation database, https://databases.lovd.nl/shared/variants/USH2A/unique). Skipping this combinations of exons will maintain the open reading frame of the USH2A transcript, and is predicted to result in the production of a slightly shortened usherin protein lacking exactly one FN3 domain (FN3 domain 11) (FIG. 3A). 3D homology modeling predicted that skipping of exons 39-40 did not interfere with the overall protein structure of human usherin in which the folding of the FN3 domains surrounding FN3 domain 11 is not disturbed (FIG. 3B).

### Generation of the Ush2a^{Δexon39-40} Zebrafish Line Using CRISPR/Cas9 Technology

[0112] We and others have previously established the translational value of zebrafish models to study the retinal phenotype of Usher syndrome (Dona, M., et al. 2018. 173: p. 148-159, Dulla, K., et al, Molecular Therapy, 2021; Noel, N. C., I. M. MacDonald, and W. T. Allison, Biomolecules, 2021. 11 (1): p. 78). The human and zebrafish usherin protein share a similar protein domain architecture and an overall sequence identity of 52% (Dona et al, supra). The protein region encoded by zebrafish and human USH2A exons 39-40 shows a 52% sequence identity. Similar to the human situation, the in-frame deletion of zebrafish ush2a exons 39-40 is predicted to result in a shortened protein (usherin^{Δexon39-40}) from which exactly one FN3 domain is lost (FIG. 3A).

[0113] To assess the effects of dual exon skipping therapy on usherin protein function, we adopted CRISPR/Cas9 technology to generate a stable zebrafish line from which the genomic region encompassing ush2a exons 39-40 was specifically excised. For this, Cas9 protein and two sgRNAs, one targeting the genomic region upstream and one targeting the genomic region downstream of the exonic targets, were injected in fertilized embryos (FIG. 4A). Correct exon excision was confirmed by genomic PCR and Sanger sequencing. A stable homozygous zebrafish ush2a exons 39-40 excision lines was bred from a germline-positive founder fish, and designated ush2a^{Δexon39-40}. Homozygous ush2a^{Δexon39-40} fish were viable and did not display any abnormalities in overall body morphology, development, or swimming behavior.

[0114] To determine the effect of the excision of the target exons from the zebrafish genome at the transcriptional level, total RNA was isolated from pairs of homozygous ush2a^{Δexon39-40} larvae. RT-PCR analysis using a forward and reverse primer in respectively exons 37 and 42 of the zebrafish ush2a gene detected a shortened PCR fragment in the ush2a^{Δexon39-40} zebrafish in the absence of any clear alternatively spliced ush2a transcripts (FIG. 4B). Sanger sequencing confirmed the expression of the expected ush2a transcript exclusively lacking the anticipated target exons from the ush2a transcripts derived from the ush2a^{Δexon39-40} larvae.

[0115] Excision of ush2a exons 39-40 restores usherin protein expression in genetically modified zebrafish To investigate whether the excision of ush2a exons 39-40 resulted in the translation and correct localization of the usherin^{Δexon39-40} protein in photoreceptor cells, an immunohistochemical analysis was performed. In the wild-type zebrafish retina, usherin is expressed at the periciliary region of zebrafish photoreceptors (Dona, M., et supra; Dulla, K., supra). Antibodies directed against the intracellular region of the usherin protein and antibodies directed against the connecting cilium marker centrin were used to co-stain unfixed retinal cryosections of 5 dpf wild-type, ush2a^{rmc1} and ush2a^{Δexon39-40} zebrafish larvae (FIG. 5A). As expected, usherin was absent from photoreceptors of ush2a^{rmc1} larvae. Usherin^{Δexon39-40} proteins localized at the photoreceptor periciliary region, adjacent to the connecting cilium marker centrin, similar to the localization of usherin in strain- and age-matched wild-type larvae. The mean intensity of the anti-usherin fluorescence signals at all periciliary regions in the middle section of each eye, was quantified using an automated Fiji script. This analysis corroborated that excision of ush2a exons 39-40 leads to a restoration in usherin protein levels with the anticipated subcellular localization (FIG. 5B; means, standard deviations and n-values are shown in Table 4). As also previously published, usherin immunoreactivity is significantly decreased in ush2a^{rmc1} mutants as compared to wild-type controls (Dulla, K., et al. supra). Excision of exons 39-40 resulted in an increased signal intensity compared to wild-types (P<0.05; one way ANOVA followed by Tukey's multiple comparison test). However, nearly all usherin intensities measured in ush2a^{Δexon39-40} larvae are within the wild-type intensity range.

TABLE 4
Means, standard deviations and n-values of anti-usherin fluorescence
signal quantification. n: number of zebrafish eyes.

| Zebrafish line | Mean | Standard deviation | n |
|---|---|---|---|
| wild-type | 42.05 | 10.90 | 28 |
| ush2a^{rmc1} | 16.15 | 8.05 | 25 |
| ush2a^{Δexon39-40} | 50.98 | 11.16 | 25 |

[0116] Excision of ush2a exons 39-40 does not alter Adgrv1 localization in zebrafish photoreceptors The correct localization of the usherin^{Δexon39-40} protein indicates that FN3 domain 11, encoded by exons 39-40, can be missed without interfering with usherin expression and subcellular localization in zebrafish photoreceptors. As a next step, the influence of the excision of the target exons on the expression and localization of usherin interaction partners was analyzed. In humans, usherin and the other known USH2 proteins, whirlin and ADGRV1, form a dynamic protein complex (Yang, J., et al., PLOS genetics, 2010. 6 (5): p. e1000955; van Wijk, E., et al., Human molecular genetics, 2006. 15 (5): p. 751-765). We previously showed that absence of usherin led to reduced levels of the USH2 complex members, whirlin and Adgrv1, at the photoreceptor periciliary membrane of ush2a^{rmc1} zebrafish larvae. To analyze whether the excision of the target exons resulted in restoration of Adgrv1 expression in zebrafish photoreceptors, antibodies directed against the N-terminal region of Adgrv1 and antibodies directed against the connecting cilium marker centrin were used to stain unfixed retinal cryosections of 5 dpf wild-type, ush2a^{rmc1} and ush2a^{Δexon39-40} zebrafish larvae (FIG. 6A). Anti-Adgrv1 immunoreactivity was indeed significantly reduced in photoreceptors of ush2a^{rmc1} larvae. In contrast, Adgrv1 expression levels at the photoreceptor periciliary region were normal in ush2a^{Δexon39-40} larvae. The mean intensity of the anti-Adgrv1 fluorescence signals at all periciliary regions in the middle section of each eye, was quantified using an automated Fiji script and confirmed the observed results (FIG. 6B, means, standard deviations and n-values are shown in Table 5) (Dona, M., et al., 2018. 173: p. 148-159). These data suggest that, similar to native usherin, the usherin^{Δexon39-40} protein is able to scaffold the USH2 protein network at the photoreceptor periciliary region.

TABLE 5
Means, standard deviations and n-values for the
quantification of Adgrv1 localization in the outer
nuclear layer. n: number of zebrafish eyes.

| Zebrafish line | Mean | Standard deviation | n |
|---|---|---|---|
| wild-type | 57.14 | 12.12 | 27 |
| ush2a^{rmc1} | 17.33 | 4.42 | 28 |
| ush2a^{Δexon39-40} | 57.82 | 9.67 | 28 |

Excision of Ush2A Exons 39-40 does not Interfere with Rhodopsin Trafficking in Zebrafish Photoreceptor Cells

[0117] Loss of usherin function was previously shown to lead to defective rhodopsin transport from the inner segment towards the outer segment of photoreceptors (Toms, M., et al., Human molecular genetics, 2020. 29 (11): p. 1882-1899). We therefore investigated if excision of ush2a exons 39-40 would still result in normal rhodopsin trafficking. In the retinas of 6dpf wild-type larvae, rhodopsin localized to the photoreceptor outer segments (FIG. 7A). In line with Toms and co-workers [29], occasionally photoreceptors in wild-type larvae were detected in which rhodopsin was partially localized to the inner segments. In retinas of ush2a^{rmc1} larvae, the amount of photoreceptor cells per retinal section with aberrant rhodopsin localization was significantly increased (P<0.05; one way ANOVA followed by Tukey's multiple comparison test). Quantification revealed a significant reduction of the amount of photoreceptor cells with aberrant rhodopsin localization in ush2a^{Δexon39-40} larvae as compared to ush2a^{rmc1} larvae (P<0.01; one way ANOVA followed by Tukey's multiple comparison test), while those levels were comparable to wild-type larvae (FIG. 7B; means, standard deviations and n-values are shown in Table 6). This suggests that the usherin^{Δexon39-40} protein is able to support normal ciliary trafficking of rhodopsin to the photoreceptor outer segment.

TABLE 6
Means, standard deviations and n-values for the
quantification of rhodopsin localization in the
outer nuclear layer. n: number of zebrafish eyes.

| Zebrafish line | Mean | Standard deviation | n |
|---|---|---|---|
| wild-type | 7.82 | 8.54 | 14 |
| ush2a^{rmc1} | 16.25 | 8.96 | 12 |
| ush2a^{Δexon39-40} | 6.46 | 4.49 | 13 |

### Identification of Splice Modulating Antisense Oligonucleotides

[0118] Based on the ability of usherin^{Δexon39-40} to properly localize in photoreceptors, we aimed to translate these findings into an ASO-based exon skipping approach for a future use in man. For this, ASOs specifically designed to induce skipping of our combined target exons from USH2A pre-mRNA were validated in vitro. For each exon of interest, ASOs were designed to target either the intron-exon boundaries, or exonic splicing enhancer (ESE) motifs within the exons. With the use of in silico analysis, parameters for (lack of) secondary structure formation, thermodynamic properties, and sequence selectivity were taken into account to minimize potential off-target effects. As a non-binding control, mismatch ASOs (mmASO) were used that contained four mismatches relative to the target sequence. All ASOs contain 2′-O-(2-methoxyethyl) modified ribose groups and a fully phosphorothioated backbone.

[0119] To swiftly identify the most potent ASO for each of the target exons, the designed ASOs were co-transfected with the exon 39-40 minigene splice vector in HEK293T cells at a 250 nM concentration, and screened for their potential to induce exon skipping (data not shown). For both exons, we identified one ASO that showed high exon skipping potential. ASOs with the highest observed exon skipping potential and their accompanied non-binding controls, are listed in Table 3.

### Antisense Oligonucleotides Induce a Concentration-Dependent Increase of Exon Skipping in Minigene Splice Assays

[0120] After the selection of the ASOs with the highest exon skipping potential from the initial screening, we lowered ASO concentrations in order to provide proof of concept for ASO-induced exon skipping. As shown in FIG. 8, for both ASOs we observed a dose-dependent increase in the level of transcripts in which the target exons were skipped with increasing concentrations of ASO. The ASOs targeting USH2A exons 39 and 40 both induce a steep turning point in exon skipping potential between a concentration of 10 and 50 nM ASO, with full exon skipping achieved after treatment with 100 nM ASO. As a control, we co-transfected the minigene splice vectors with a target-specific mismatch ASO (mmASO). These mmASOs were similar to the identified ASOs showing the highest exon skipping potential albeit with 4 mismatches to the target sequence. In none of the cases and not even at the highest doses that were used, the mmASO was able to induce splice modulation, demonstrating the sequence-specificity of the results. By co-transfecting the USH2A exons 39-40 minigene splice vector with the ASOs targeting USH2A exons 39 and 40, dual exon skipping could already be achieved at a total concentration of 20 nM ASO (FIG. 7C). All exon-exon boundaries of the amplicons were sequence verified.

### Antisense Oligonucleotides Induce Dual Exon Skipping in WERI-RB1 Cells

[0121] The retinoblastoma-derived WERI-Rb-1 cell line (McFall, R. C., T. W. Sery, and M. Makadon, Cancer research, 1977. 37 (4): p. 1003-10) endogenously expressing USH2A was used to evaluate the dual exon skipping potential of the identified ASOs. USH2A transcripts were analyzed by RT-PCR using primers in exon 35 and exon 41. Co-transfection of WERI-Rb-1 cells with ASOs targeting exon 39 and exon 40 in a 1:1 ratio for each target exon (100 nM ASO_39 and 100 nM ASO_40) resulted in the anticipated dual exon skipping effect, without the induction of detectable amounts of alternatively spliced transcripts (FIG. 9).

The application's sequence listing, which the Patent Office published only in electronic form, follows.

SEQUENCE LISTING (33 sequences)

SEQ ID NO: 1 - DNA, 800503 bp, synthetic construct
  source 1..800503: mol_type = other DNA
tgtttgctctgcagaatactttacctgggcacccaagtcttccttccagcattcctgctgctacagcctatttgctgagtaaccaggggttacagcagcgttgccaggcaacgagggacagcggtcctgttgaagagccatttgtcacactgaggggactggttgaaatgcaataaagaaatggtaactcagcttatttatcaatacaattacttgcacagtattagggatccatgtgtaacctacaaattcatagtcatatgaggaaacacagaaacattttgctaaatattaaagcataggacagacagatggtgttgggtttctaatcagctttactctgagcttaaagttgctgcacatgctgggataaggggaaaggcccaaagtcctttgccagctttattttgggcatctgtaagttagctctgggttacaatgtacagtgcatgtgtaaagaaaatctacaagattcttttccctgttaagtagagctggtaatgccattgctaattccctggggtgaagtaacaacacaaaattattgtatgtgtaatatattattaataattatatatatataaaacacacacatatattatataaatatttatgtataactggttataaatattactggttgtcctgtggacttataaagtgcttgatttgcccaatgcaatcaagagatttaccaaaaggatgagtattttactctgagcactgtgcttcaaaatgttttttgagaagttcagtagtgttgcttctaggagctcaaagtcctcaggcctgggatgagcttcagttttaaaggtgcagcagctttcccttgacgccctacgtttttgattcccagataccagcagctactcatgtcttcgccattgctaagaacgtcgttggtattaccttactctgagaacgtgtctgcagtttccagaaaatggagtatcgcaacatcacttaaagtaccctgcttcaaagtattgctggcaagtggcgtgggcctgattatttatttagaaatgctttatcaggaggagaatgcttttttgtaaacatgaattgcccagttctttcattgggctctggcttcttgtttcaggtcattgaaatgttgatctttgcctattttgcttcaatatccttgactgagtcacgaggtcttttcccaaggctggagaacgtgggagctttcaagaaagtttccatcgtgccaacccaagcagtatgtggactcccagaccgaagcactttttgtcacagctctgctgctgctgaaagtattcagttctgtacccagcggttttgtattcaggattgcccatacagatcttcacaccctacctacactgcccttttctcagcaggcctcagtagctgcatcacaccagacaagaatgatctgcatcctaacgcccatagcaattctgcaagttttatttttggaaatcacaagagctgcttttcttctcctccttctccaaagctgatggcatcatttaccttagctgtatggctgaaacctgagcaacaaggtgtaatgtaagtagtagtgtaggtataagctttcataggtccccaaaaccagtagtagtgaagatcatttcagcctgaattccaaaccggaagtgaaggctatatagaattcatggtattgaagactaactcttccagttgtttccccaattaaaatttttttctcttctatggatgaaatggaccatgaaaaaaaatgtgaaaatagtttatcaaaggcaaatgtgtttatgcaggaatcatttattttctatagcttagcgcgacctttggtcttagccttcaaagcctaaagaagactcagagtgagttttaaggcatggaaacttgtaattaatacaaataattaatattttcaaaatcttgaactgggtttatataatcaacatttccttactagggtataacattttcattaggcagatagttctcccagtccttgggactgttttcttcatcctcgtttccccaagaagagctgtttgtttgactcatggaagatgttcagtaatataaattgaatatataaataaccctccatctctaaaaacatatagcttttagttctttatcttgtggtattttcattttccaattagttaggaaatatgtaggtaagtgtgagagattctcaaaagctttcatgctgttcatcccagagaaatgccttcaatgagtctgggtcttattactgccattttttgttatttaatcaccagtttttcattctgtaatcttttctcaagctgatatctaatgagtttcttctaaatatttattgccaacctggagattttaatatacaggacagttttgaggaatttttgcttatcttttttcttcctagagggcttttggccctttctcttgtgacattttctgtgtgtgacagcgttggctggatatctaaaaacttgtgaaacaaaccagaaaaggattacaatctcataagcaaataggacttaaatgtttttggtgtttagtttcaatttgccaagtgaaagttggcatgtcttcattttgttttaaatttggattaatcacaaaattaatcacaaaccattcccatttctacatctctcctcaaagaaaaccttgttttcttactgtttgaaattctagtaaattcaagctactcagtttatataattaacatctgaagagtcttaaaacattgtcttttgacaaatagggctaagataaaatatccttctgagcttgtagggacatatctgtaccaaattcatcttctattgacatcattttgtataaataagacagagaagtatttacagggttggaagaacatggttaatggttttgagagttccttgtatcaaggtcgtttccattttcaaaattaaaatacctttgggaattgggggaatttcggggtgtttgcactagataagtaaaacaaacaaaacatggattatccaattattgtttattcaggagcagaataaatccagttcctaaatattttgctacctgccttcctctcacatttattatctaccaaagctagtatgtttacaagcaaacaaaatagcaaggaagataatcaataacatattaagaaatgcattttcagtaagcttgggaaaataagtctgcatttggtaaatacattcttgagtaatggtcgaattctcacttgtagatttaaacagaagaaaaatgaataggggcaaactcttttcaggttaagacctgatgggtagggataaaaacaaattcacttcagtaaattagaaatattcaactactgaagggttaaaaatataatttgcagtagaatttatataaaacttttatttctacttatataaaacctttatgtcatctaaatctatttgcctaaattaaaaatatacttgcactcataactttataccaaatatacatacaaaatatagtaaaattgtgacagtaaatgagggactattagtgttttacaatcttattcttacctcccaactcaggaaaaaaatagatgcaagtgatagatgcaagtgagaagaaattatgtgtgaaaaacatgccctttaaggaaagctttaaaccatctttagcagtaattcttgattggctcaattttatacatttgcctctctgatacttcctaccaaatttgatcacaaactcatcattttttgagagactactgtatcctaggtgtttgtgtgtgtatcctcagaatactcatgatctaaatgatctaatggagtgtacagatggatgagtgttattacctaggcagcacagtgtgttaagtgagcacaaagtgagacccctcaaccgaccctgagcaggaagaagggtgccaggaccaagcataatcattcagataccaaagctaagtaggaggtaaccaggtgaagaagagacctcaaggtctgaaaggtgtgtcactctaataagggtagagataacttaaaataatttgataactgccctgacacaagacctggaagttttctgaaaactcttctagtttttcaaaatcttatttcactgtgttctagaaggctgaaggacctttcacctcagatatttaacatgatctcagtacctcagttggactgtacggtcatggagaggtagccagtcatcttacagacactggctttggctttgtgccagttgatgatggggtgagtagagactatagctgtccattcttcatttcaccatgggaattaaatagagtgattctgacttcagggctaccaatttagagccttccatggacactaaatttgctttacattaaaaaaaaatttttgcactgatgacttaatactcaagcggcctgtagtgtgttgtaccacttcctctaaaagaaatagcaggagaactaatgagccaataacctaaatgttagttttgcagaatgattcaaccactttagtttccatcatgaatctctaatgaagggtgctgaggctctggggaatatattgtaaataagaattctattttttattgaaataaaggggcttcttcattggaataaagctttcattgaatataatgacattcaggcacttattcatagtacaccattttgagcaaagtttgaggtcattttaacaccactgtaactgcacaataccttagcatgtctttttggttggatgctgaccttttctctcttttccggttgcttcctaaggtgtgttatagaaaagacagtagatgggcagattgtgttcaaacttacaatatctgagaaagagaccatgttttattatcgcacagtaaatggtttgcaacctccaataaaagtaatgacactggggagaattcttgtgaagaaatggattcatcttagtgtgcaggtgagtaaaataaaaaatatttaacatttggttaaacacaaggatttgtcttcctttctctcttttaaatggcatctactcacaaaatctgcagcagtatcttttagatttcaggtgtgtataaatgacaactaaagaagaaaaatatttaaatgacctaatgatgtatctcttgatatactagcatttcctcccccaaaattgctgtaaaagctctcacagaaacttaaagacaatgctatctgtaattgtaatatcctcagaaaatttttgttttcttgggttcgtatattctattttgtttaaaaatgtgtaagggctcatttgatgtctggtactaattttactagtcatggatgtattaataccccagcttgatttttacatctgtctttctcagcagctgatgatgtgaataaaatttgtctgttgcattaaaatggtgaccttagaactaatgaactttacacttgaggcactcaaaaggtgttatattattattttagttgtcaaccacagtttgtatgagccttagaagctgctaaaggctgagagagctgtgacatgtctggtatttacagtctccagaagagaggcacagttcatccttttgttttttcagggcactggaatggcccaatacagttaaagccacacctgcctttcaaaccaggtgtattagtccattcttccactactataaaaaataccggagactgggtaatttattataaagaaaagaggttcaattggctcatggttctgtgggctatacaggaagcatgattctggcatctgctcagcttctggggagaccttagaaaacttacaatcacggcagcagacaaaggctgagcaagcacttcatgtggccagaatagggaggaaaagaaagaaagggaggtacttcacacttttaaaccaccagatctcatgagaattctatcaggagactagcactaggtggatggtgttaaagtactgatgagaaaacgtctacatgttccaataacctcccatcaggccccaccaccaaagctggggattacaattggacatgaggtttgggtggggacacagagccaaatcatgtaacttggggtgctgggtaccacagtttccagtatgagctctcatatgagcatccatccagtggctcatgtgaacctcatttgaactagaggacatttacatccttgttcattttataaaaattatctttgatttctcacttttttttttttttttaatcttgaagcagataatgagtgtgcgtcctcagagggtcttgataattgttcattgttttggctttcagatactaagatatgagtttagcaaatgtgattggcaggggtcagagttttcatacacaactagggttgaaatgatacacaaaggggacgtcatgtctgacgtcaagccttgtgcataggacatgatggtttctgattctcaatgcttattctccatgtgttcagtagttaacagataggagaccaatttgtcctagtcttgaagtttccattgtcttgaagtctccattctgcccactgaccagtcctacagaattgggttttaatattaaaaacgtagaaatagaaacttttaaagacagtgccatctttgcagaagatgccaaatagatatgtttgttgcatatttttgtatcaacaatgacaaaaaaattatctttacttgcctttattttgtgttatctgtgaaactgtgccatgttttggcaggcagtagtacattaaaagcttcacaaagaaagtttaaaatctaaatgcagagcggtaaccatgactgaattactcccttggggataaaatgctcttagagtgcctactgaaatcagcattatcatttcaatacatgtcaaatatgagtcatttactagtttaggcaaaatttcttcatgaatctttaaatctttctcttctttcaagaaaaggttaaagtacttatgatttaatgagactgctttatttcataactgtttgactatcaagagaaaacttgtccttttcgatttgtacactcttttatttatttttttgcataagttttaaactattctgcattttatattaaaactacagaactaggcagtcacaaaatgttagaaaaccattcagatctgtcatttaatcatctagcacttattaaatatttgaggggtatgcagcattatgggaatctggatttattcaaatgaaaattaaagagcaattatttactctaaaatggagctctatataaggttcctttatattggacaacagtctgaatatgtttaaggtattatgaaatttataaaaatccatattatagatttttttttgagacagagtttctcccttgttgcccaggctggagtgcaatggcatgatcttggctcactgcaacctccgtctcctgagttcaagagattatcctgcctcagcctcccaagtagctgagattacaggtgcctacaaccacactggctaattttttgtatttttagtagagaaggagtttcaccattgttggccaggctggtctcgaattcctgacctcaggtgatccacctgccttggcctcccaaagtgatggtattacaggcatgagccagagtgcccagcctagattttgaaaaaggaatgtactgattactcaaaagttgttataagaaataatggaggccaggcgcagtggttcatgcctgtaatcccagcattttgggaggtagaagtgaacggatagctcgaaccaggagttcgaggccagcctgggcaacatggcaaaacctcatctctacgaaaaaacaccctaaaaaaattagccaggtgtgatggtgcgtgtctgtagacccagctactcaggaggttggggctaaagtgaaaagatcacctaagcctggaagtcaaggcttcagtgacccatgatcatgccactgcattccagcctgggcgaaagagcaagatcctgtctgaaaaaaaaaaaaaaaaaaaaaaaaagtgacaggaaggacaggagattaggagttgggaaatctgatttaggttatgctactctgtagtcttaagaataaaatttataggaatccatatgatagttgtttaataaggaatgtactaattgcttaaacgttgttataagaagtaatggaagctgggcacagtggctcacacctataccctgcccgccttgacgtctcaaactgagtcatttgactcagttttcctatttacataagaagattgaactagatgaacaaaatgagggccttttgaattcttcataaacaagtaagtggagtgtggagtgtagcacaagtcattaaagtatggcaagctgttgagttgtgtagggttatttaggtagtaagtgacagagccagccccattaaccaatgatcagtcttgtgctttttttctcttctcccatgctgcttggcatttacataaaaacatttttttgctagattttctggacaaaatatagagaaatgtagattgttactattccattgtataactgcaagaacatttccagaaaaaatattttagtataaaatgtaacttactgttgcatgattatataatgcatctaaactccatttaatttggggattagggacttttatcatgctgggcataggacagaacaaatgattaataatcttgtttagtcaagtttcaaactacaaacctgcactttatgtatatgtggattttcacccatcttccaaatggccacaaattgatgaatttatatagtgtgtgtgtttctgtgcatgtgaaaaaataaaacatacaactctattcgtggaatggcccagaaaccagaattttagttcgttgcttatagtgattttttactggttagcttatacctggtggcataaaattaattagcagatctcaacttatgctttatctcagacagttcacttgtatcagctttccatcagtaaaatcagaattctaatttaccaaaatcagaaaaaaaattattttaaataattaaatatctgggggaaaagatgtcaggaaatccagacataccaaaattggaaatcgaatttcctaaacaaacaaatagacaatatgctcaatattgctatggtaatgaatctcacagcttttattccaaaactagcattttaaagtgtcaatctgttggaaaatgattagtgtttaaattaatattcatttatggacttgaatctgacaggattgccaattgaaattttactttggggtttaatatattggctatttcaaattatatcaagctaaaattcattgtgtcattttttatactaaaactagaaaaaatcaattcatagtttttattatcatatagggaacactgatcatattagcaaaatttttaaagcttagttttcatattaaatcagcacatgctgtagttataagatttcctttggttactcttataaaagttttgaaatatgtaaaaaaatttactttagcatttcgttatggattggtaggtaaaacaatatggaaataagtatatgtgtttagtggcatttcatttaaaagtaaaactttagggttttctttgacaatatattttgccttaagcagttccacacattttatagcccaaatagtgtcaaagaatcatcagtatagtcatccttctagtaattatgcagaattgcagtaaaacaattactacgatttgaagctgatgaaatactacagctgtggaaccaagaaatgatttagcattgggcttgttcacattttctatgctattttcagggctccttgatacattgacaattcaagagccatagatgactctagctacaatagtgtgaaaaagagcagttctaatatgatacaatgaagaaaaaaatgcatgggtaaataaagttttaggaatcaatatatgaaggataggagtttcataatcacagttcatgaagtatgctcttttgatttatgtattcaatctaagaaagaaaaactattgatagttctggaggaaaacaaaatgcaatttaaccaacatttgttagaatagataaaccaagtctctcaattaatctctgaactgtatgcccatgtgcacactttataaaggtgtttccatgttcctattgattgagggaacataaaacatccatgtcaccttatggaagcctcctcattcagttcagtaagctttatggcatagaattgtcataggaataccatcccagccccactcccattctaagagaatctcaacccatattatttctttaatatatcattgcatttagctctgactctgtgtgtgtgtgtatgtgtgtgtaagtatgcatgcatatgtgtgctaaatgtttctttgtgcaaagccttctctttatatctagccagctgggttaacagctcaagttagttgaatagttttgggttattcaaaataaattaagatcaatagaatataatgaagtttttcagaacaatcagttacaaattatcatagctgctattaatcattgatttatgtgcactatattaaacatgttacatatttgcagttatacaatgaaatagtgacatgcttgtaacatgtttaatatagtgttaataatagctctgtgccactgacttatattatctccatgacagagattttaaaaaattagccttaggaaatttaaactacctgcctacatttatagtcccaagcttctctgaccttaaactaaaagtaataacttgccatgaacatgggtcactgagcagatctaaataatagtttttaaaattctccaaaccaaaaaaaaaaggcacagaatcccaaaagaactgaaaacatatatttataatgtaaatataattttgtatatttatacatatttgtaatataaatattttcaatgcttcagatatttacatgatttatacaaataattaaagtcaatatattttttaactatacccctcattgatacaagcaatttaaatgtacaacagaatgtaattttgtataaagttctgcgcaatattttcatgttttatggcagttgcgatagactacaatggcttaaagaaagaatatttcccttaagccagcctgatcacctgacccatgccttatagaatcaacccttattacaataaaatacaaagaaggaagcacttcctactttattatggaagaggtaaaaccatccaagtaaaaaagtaattattctctgtacgttttttgcatgtgattttaaaatgcaatatttaagcagaaggcaaggctttaattcttgaccttttagtaaaaaattgtgcaaccctgggaaaactatgtaactcctcaaaatgttaggatacccattacaaattggaaacaaacaaacttggcctatttagcttacaccataaatttgaacatataaagaaaatattgtctactaaaacactttatagcctataacttcctgctatgaaggagcttacagtctcttcagaggataagcaatcaaataattacacaaataaaggcaaaattataattgtggtaagtgctacatgatcacatgaagaatgatttggtcaaaccactgaagtcaagaaaagcttccttgagtaaatgttattgaatatgtgtattagttttctaggcctgtactaaaaaattatcacaaactggtggcttaacacaacagttaattcattgttgaagagttctggaggctagaaagctgaaatcaagttgttagaagggccatgctctttctgaaacctctagaatccttccttgtctcttccagcatctggtgtttgcacagacaccagagtatgtgattgtgctacctcctggggtttgtctgcccacagcaaggccgggaacccagaaaagaaaagaggagtgcccagtgtagccaccacccactgcatgagaaacagagctggcagcaatccttgatgctccttagcttgtagctacatcactccagcctctgtctgcattatcatatggtcctctcctctgatcgtgtgtgtcttctcttcttataaggacatcagttgtactggattaggattcttcctaattcggtaggactcatcttaacaattacatccaaaaagacactacccaaataaggtcagagtcacaggcacatagggttagggcttcagtatgacttttgatgggacacagttcaactgatagtaagatttattcaaaagaatgcataggatccaactgggcaaagagaattgataagaacattccataaatgcatagcaaatagtgtaaatgcccttgtataaaaagaaatatgttacatagactaaaaaaccaaagtggttagagtgtcgctggcaaagtgggacatggtgtgaaatgaggacagaacagtaggaagaggctatgtgttaaagagaatcactggatatgttaagattttttttttaaatggaactctattgaactgttttatgtgaaggacaggagatgagggatgaggataaggaaggaaaacgtatgatatgcacagattattttttcctaaagatcactttggctgcagtgagggagaatggtttgcttgaagacaagtgtgaagggttgttatggtattttcatggaccaagtcagatgtaagtgttacttacttacagcatgaagacaatagtgaatatgcaaatgaatggtcagctttgagaggagtttaagaattaaattaaagggcttgttgatgaaggaatatgtaatatgagggaaagggagttgatgaatcccagctttctggcttatgtaattgcaggtacagtgatttctttttctcaaatagaaatactggaagagaatcagattttggatgtggagcacatatgaattagattccagtttagggtaataattctcaactatagaaattattagcattattgagaaactttaaaaaatattctgatgtccatatccctttatgtcttcattggtctaggtggggcgcaggcattatttctttctttcttccttccctgatggatttaaaaaggtgtaacaaaagaaaatatcagtctaccattgatgagcatttaggttggttccatatctttgctattgtgaacagtgctgcaacgaatatacatgtgcatgcgtctttatgatagaatgactcagattcctttggatatatacgcaggaatggaattgctgggtataatggtagttctgttttttttggtctttgaggaattgtcacactgttttctgtaatggttgaagtaatttacactcccaacatcagcctattaagcattcctttttctctgcaacctcactagcactgttgtttcttgactttttaataacagacattctgactgatgtgagatggtatctttcattgtggttttgattgacattgctctgatgatcagcgatcatatgcttgttggccacatgtatgtcttcttttgaaaagggtctatttatgtcctttgcccactttttaatagggttgtttttttcttgtagatttgttgaagtttgttatagaggccagctatcagacctttgccagatgtatagtttgcaaaacttttctctcactctataggttatctgttcactctgttgatagttcgttttgctgtgcagaagctctttaatttaatttgatcccatttgtcattgcttttggcatctctgtcgtgaaatctttgcctgttcctatttcctatgtccagaatgctattgcctagattgtctttcaggcttttagttttgggttttacgtttaagtctttattccaacttgagttgatttttatatatggtataaggaaggggtccagtttcaatcttctgcatatggctagccagttatcccaacatttattgaatagggagtcctttccccattgcttgtttttgtcagctttctcaaagatcagatggtggtaggtgtgatggccttatttctgggctctctattctttttcttcggtctatgtgtctgtttttgtaccagattcatgctgttttgcttactgtagccctgtagtatagtttgcagtcaagtaatgcaatgcctccacctttgttatttttgtgtaggattctctgtctatttgggctcatttttggttttatatgaatttaaaaagtttttttctagttattccaagaatgtcgttgtttgtttgatagaaatagcactgaatctgtaaattgctttgggcaatatggccattttaacgatattggtccttcctattcatgagcatggaatgtcacacaaaccaatgatatctgtttgtgtcatctctgatttatttgagcagtgctttgcatttctcattgtacagatctttcccctccctggttaactgtattcctggtattttattctttttgtggcgattgtttcacctgcttctaatcaaatctatttagtagctgttattaaactgtgtagccattagtatacagtagtactccattacccttggctttgctttctgttgtttgtcacccacagtcaaccacagtctgaaaatatcaaatggaaaatttcagaagtaaacaattcataagttttaaattgggtgctgttctgtgtagtgtgatgacatgtgaggtggtcaccatacctcctgcctgggaggtgaagcatccctttgtccagcagcttctccatattgtctatgctcctagcccttcagtcacatagtagctctcttagtaatcagatcagctgttgctgtatcacagttgtaacttgtgttcaaggaaactgtatttcacttcttaatggccccaaagtgcaataatagtaatgctggcaatttggctatgccaagaagccataaagtccctcttttaagtgaaaaggtaaacactctcaacttaacaaatgaaagagaaaagatcatatgctgaaattactaagaacttcagtgtaagaatgtatcttctgtccatgaaattctgaacaatgtattgttataattattctattttgatagttattgttaatctcttactgggcctaatttataaaaattaaactttatcttgggtatgtatgtataggaaaaaacatagcatatattgggttcagtaatatccacggtttcaggcattcactgggagtcttgcaacatatcctcaatggataaagggggactactgtatgcgcaatatatgtatacgcttaaaaagagttttgtttagctagtgtgtgtaagaagattatcacaagtcacactgtagtgtttgccttttgccagtctgaatgttatcatcagtctaatattttatagcaaagatttaagttcattgaaaacttccctatggaaacacttccaatcaagacctacagcaagccatgaataaattaacatttaaacatgaaaactgatatttgaagaagaattagcaattaataatttctgctagaaaatggtggtttctcagccaatagctataaattgtataatatatgtaaaaggaaatatatacaaatatcatatgggacatatatcacatatactactaaaattgaaaattgctataaatagaagactatgttccaatgtccactgatttttttttttttaacaatctctagtcttgaaaatgccactatggtaattctgtcaaatttgtaatggttgggatttgatggtagtgcttttgaaacctgtattatctaatggaattgtcatttatattatatcattttcacctaaaagccaaatacaataagacttaaattatttttgctttttttgtggatagtcatttttgtgcccaaagggctaactgatgccttcagttatacatgaacaattcgcactaacgtcaggaagaacagtgtgcatataacctagggcagaatttggtctatggaatgtatcactcagtagtggaatggagattatgactttatttaaacatggacttgagtagttttatttttccttactgtttcccttggcatttctttctctaaagtgcaacattcaaaagtattctatgcagctgtagtgtcctggatgcataataagggcatatgttcaaggcaagtttaaatatccacataagccaaagacagagtaattaacattaaaaaaattaagacaacttttccaagaatgaaaagctttaatagattagctaattttagaattatttaacaacaactgtgaaaaattattagtatttacaaatatgtatatataaatatatgtaatgtcttatgttagacagcaatttcattctgctctctaatgattacatgacatacttctgaaaaaagtcaaacagtgtgttctagaaggacaaagaaataattggttcagttttgcttatacttagtgttcaattgttatcaacctggggtgggaggaagggaaagaaagagggaaggacagaagagagcaagaaaagaaggaaggaggagaggaaggagagatggaagtcatgtgacatagctagggatttggggcaaaattcaagacccatgttttccttgatggaaagccaaggaacctgagaaggagagtcagcccatgccaatttcactgtggtagaggtgaccaagaaagtttacattatggatgtatagtaggtaattttaggttgtttttgtctgggatataaacccattgtgttattccagttatttggccaaaatgttccatgcaaccattttggagtgctagcactttagggaatttataaaaaggggtggtgttcagtgtctgggttgaatacaaggtaggtagaaaaggacaatcaaaggaattagctgcaaatgagatgaaatctatgggaacatatattgagaaaactagtgaccattataatttaatcctctgaaatacctgcaacaatctgagaacaaggtaggtggcaagatgcatttataaatattaaagaaacacaagaccccatacactttgaaaactggggagtaccgaacttggagaggtctagtataggtagtgcttgttggtttgcatatttttaaaaccactttattgaggtctgattgacatagaaaagtctgtccatgttgcatgtatgcaacttaatgagtctaaagataaatatatgcccatgaaagtatcaccataatctgtggcataaacatatccacctatttgtttattcttaattaaactttttcctgagataattgtaggttcacaggcacttgtgagaaataatacagaagtcccatgtaccctttactcatttgttctcatcagtaacatcttttataactatggtacaatattacgaccaggatatggacattaatataaccaatattattcacatttcccatttttcatatattcctatgtgtatatgtttagatccatatgattttattaaaattttatccaccacagccgagttgcagaaaagttccatccctacaaggacacctcaagctgcctttttataaccatgcccactgtctcccttcccctactgctgccacaggtgtccctaacttctggcaaccactcacttgtactctatttctaaaatttggtcttttcaaaatgttgtatacatgacatcacacaatatgtactcttttgggattgtttctttcttttttactcaacataattccgtggggattcattcaagttgttaagggcattgatagtccaccttattgcagcatagcattccacggtatgtgggtaccatggtttgtttaacccttcacccattgaaggacatctaggttaattctagttttgggttgtatcaaacacagttaaagcattcgtgtggatgtttttgttaacatacatattcgtttctctggaataaatgctcaagagtgcaatagcgtatggcagttgcatgtgtgtgttttaagaaactcatttccagagtggctgttccattttagaatcccaccagtgatgtatgagtgctccagattgtgcacatcctttgtagcatttaaaataaaggctacatttattttactatttaaaataacattttagccattctgatagataatatatcactgtggttttattttgcatttctttaatgactaatggtgttcagcatattttcatgtgcttatttaccattcatatgtccaattcggtgatgtctccccatgtcttctgcccattttctaatttgattgcttatttgtagcttgctgtttttattctttttacagggttttgctgagattgattaggtccaatttatcaatctttcctcttatgtattgtgttttccatgtcaagtctatgaagtcttgcctaaccctaaatcctgagtattttttctaaaagattttttttattttatattgttaaatttaagtatgtgtttcaggccaggcatggtggctcatgcctgtaatccccacacgtcaggatgctgaggtgggtgaattgcttgagcccaggacttcgagaccagcctgggcaccttgtctttacgaaaaattggctgggcatggtgctgtgtgtctgtagttccacctatgggggaggctgaggtgggagaatcagttgagctctggagtttgagaccagcctgggcaccttttctttacaaaacattggctgggcatggtgctgtgtgtctgtagttccacctatgggggaggctgaggtgggagaatcagttgagctctggagtttgagaccagcctgggcaacttggtgaaacctcgtctctactaaaaatacaaaaacaattagccaggcatagtggagtgcacctgtagtcccaactgctcaggagctgaggaaggaagatcacctgacctcaggaagttgaggctgctgtgagcagagatcatgccactgcactccagcctgggcaacagagtgagaccctgtcttaaaaaaaaaaaaaaaaaaaaagcctatgtttcactttgagttaatatttttttaaggtgtgagatttggttttgagcagtggatgtccaaatagcccttagttgaaaaggctatatccttccttcactgaattgctttggcacatttgtcaaaaattagtagaagatatttatgttgatttatttcagaattctatgtatatccttccaccaattccacatgttcttgagtactgtgagctataatatctagtagagcgactccttctactttatcctgctatttcaattacaaaaaataataaaccttttagggcctatgattttccatataaatttcacaataagcttgttgatgttttcaaaatatcttgtttagattttgataggaattgcattatatctatagatggatttggagtgatttgaaatcttttactatattgagtcctctaatatataaacatggtgtaagtatcaccatttaggtcctcttttattggcattttgtaatttttagcacatacattgtattagtctgttctcaccctgctataaagatactaccagagactgggtaatttataaagaaaagaggtttaattgacttggtttcacatggctggggaggcctcaggaaacttacaatcatggtggaaggtgaagggaaagcaaggaccttcctcacgtggcgtcaggagagagaagagtgaggtgtgaaggggaaagatccccttattaagccatcagatctcgtgagaactcactcactatcatgagaacagcatgtgggaaactgcccccatgatctaatcacctcccgccaggtgcctccctagacacgtggggattatggggattatacagttcaagatgatatttgggtggagacacagccaaactatatcatacatcctgcacctgttttgttgagcttacccataaagtgtttcattttctttttggtgattgtaattggttttgtgttttaaattttggcttctgcatgattattgttggtatatagcaatgttatgaattttctagggtgatcttgtatttcaaaactttgctgaactcacatttatagtagttctggaaattctttatttgttggaattttctacatagacaatcatgacatctgaatttggagcagtttttttaatctttccaatatgtagtttttatttctttttccttactgcagtgactagaatttttagtagtatgttgaataagaaaggtaagagcagagattcttgctcttcttgttcctaatcttaggaagaaaaagagttcaactttcaccattaagtatgatgttagctgtagattgtttgggtaagtgttctttatcaaattaatgaagttcctctctattcctaatttcttggagttttgagtattaaatattgtcacaaggcattttctgattcaattgatatgattatatgatttttcttctttagtctattaatgtggttgattacactgattgattttcaattgttgaaccaaccttacatacctgaaataaatcctacttggtcatagtatacaattatagtatatgtagtatacaattccttttatatagtgctgaattgatttgctcttctttctctagtttcttgaggtagaaacttaatgttttaagatccttcctcttttctcatataagtattagatttagcttagtgttgtaatttaatgtgtaatttaatttagtatttaatttagtttagtgcaataaatttccccttccacgctgctttagcagcatctgacatattttattatgttgtatgtttgactcttggacaaaatgagggcttggggtattgactcccgatggagttaaaaatttgcatttaacttttgaccaccccaaaatgtaactactaatagcctactgttgaatggaagccttaccaataagataaatggtccattaacacatattttgcatgttatatgttttacgtgctgtattcttataattaaatagagaaagaaaacattgttaagataattataaggaagataaatatatatttactattcattaagtgggagtggatcattatataagtcttcatgctcattattttcacattgagtaggctgaggaggaggagaaagaagggttggccttgttgtctcaggtggcaaaggcagaagaaaatttgtatataagtgaatctgtgtagttcaaacctgtgttgttcaaaggtcagctatattttcatgtgcattcagttctatgtttttgaaatttcctttgaggttttcaaaattttcttttacaactttctttttgactcatgggttatatagagatgtattgtttagtttcaaataaattggagattttaaatattataattctgttattgatttcaaatttgaatcattttcaatcagagaacacattcagtgtgaattcagttctttaacatttgttcaggattttttaacaggccagaatgtagtctatcttggtgaaagtttcacaagtatttgaaattaatgtgtatagtttgttttgtgtttacacacgcacacaaacacagatgcatacacatataaatcttctgttatctttttatttctatttaaagaacttcttttagtcattatttaagagtaggtgtgaagaaaaccaattctcttataaatagaactaagtacatctactttgtatacttttcttgagtgattctatattgtaatgatgtcctttttactagttctatcaattgctgagagtttgctgttgacgtccctgatttaattgtgggcttatctatttctcctttcagctgtatcagtcttgcttcatgcatgttaaagttctgttgttaggtgcatacatgtttaggatcattaggtctttctagtggagatatcattttatcattatgtaatgtccctcttaacctctagatatttggtttgttctgaaatctatgctatttgatagttactagttattccttttttcttttgattaatgtttgcagatatatttttctgattactaatttcaactgacctgtgttgatgtccatgaagtgaatgttgtacagatagcatattttttggatacttttttaaaaattaagtttatattctaatacactctgctaatctctgtcatttatttgtatatttagaccatttacatctgagattcttactgatatgctagccttatgtgtgcaattttattttttctatttcttgtctgttgtgggtctctgcatttctcttttctgaccttgctgtaggttacgtgaacacattttaggattctatcttggtgttttaacagcattttgggtatatcttttttgtatagtgtttttagtggctctaggtattaaagtatatgtaagtcacttatctactgacatggacatattactacttccattaaagtgtacttttatttccacttaggtcctttactcattctaccttttcagtataattgtcttaagtgtttcccctacatacagtgagcatcacattacactgagttgtaatttttgcttcaaccgtgaaatattatctagcaaactaataagagggaaagtctaacttatttccccctaattttattcattctgatattcttattttctttataagttctgaagcttttattatcattttgtttctatttaaagaacttcctttagtcatcctttaagaatgggtttgatgaaaacaaatactcttatttttcactcatctgagagtgtcttgatttttccttcattccgaaaggatatttttgctggatataaaatttatgattgacagttaattgctttcattacttgataaatgttgtgccactccttctggcttctaatttttcagatgagaaatctgttgtcatttgaactggtatttacttataagttttacatcattcctctggctgctttcaaggttttctctttgcttgttttgtatttagcagtttaatagtgaaagccctagcatgagtttccttggttttatcctattgtatgagatttgctcagcttcttgcatgtgtttgttaatgtcttttgccatattttcagtattttcagacattctttcttgaatacattttcactgccattctctcctcttattctaggattccagttatacaaatgttaactcttttgtttttaactcactggttcttgaagctctcttcaagtttttttttttccttttaatctctcttttcttatttgttcaaattaggtaaattcttttgatttccttcaggttcaggaatcctgtcatcttcctgttacccttgaacccatatagcaagtttgagtttgtttcaatggttgtatgtttcagttatttagtttccgtttggatcttttatatatatatatatatatataacttctatttctatgctggggtttctctcattttttttcttgcttgaaagaattcacaattgcttgttgatgcatttttattgtatctggtttaaaatccttgcctgataattccaacatatgattcatatcactgatggcatctgttgatcttcttctttcattcaagttgttattttgatggttcttagtatgacaagtgatttttattatatcctggatgttttgggtatcgtagtatgagactctggatccaaattcatcttctttttttattcagaagctgtccttacattgaggtgtgcacagaggccaggtgggtgtgtatgttcattcatcaccccgttgtcactgccaacatcatccagcagaagtggagcactgactcacactgcagcagatgggtagggtgaaacttcagcttccctgttgaccccttcccagtgaaagcgggccgcctattgctgctgccttgttgcccctcatggtgacatattcctaactccccactgagccacggaagggaaaaattcattgcttgttcacactactttgttgctgcagggtaggggtggaagctgagcttcctgctggtctctgtgacaccaggggaggtggggaatggagtgtcaagtaaccctcctcctatcaccttattctgcctcattgatgccaggtgtgagagaaggttctgcttctctccagaactctcccagttcttgtgaactgggtccaattcacaagaaagggaaaaaggatgtagagtattgattggccctaacacctagcacacagtctcactaataccactgggagtaggggctcagctcccctctaggccctgctcacttagtgagggtggggtgggaacagaatggagactaaccctgacacacaccacctcatgtggtcttgtgctgtgaagagagtggagaggttcattccctccttggtcccactgacaccagaggttggagtaaagtaaagtgctgatgagccctgactctcgtgtccttgtttagtcttgttaatattgggtggatgttgagcttcagctcctgactggggccctgccagagccggggggaatgtaatgtgctgactagtcctgccttgcaccacttcactaagtcttgctgctaccaggtaggggtggtggagatggtttagctacttgctgggctgaggtgacactaacttagtaaagagttggagcatggctgactcctttcagacaggggatgaaagatcagccctctgctcactctgccaatactatttagaaaagagaatcagagtggcacaacttccactgagcagaggacagaaaataagctccttatttggtctcatcaaaaccacccctacctacagttagacagctgcctgtttcaacaagtggagaatggaagatcagctctctgtttggtttattggaaccaccaggcaaggggaattggaacactgactgcttctgccagtgggaatagaaggttagctgcctcttggccctgtcaacaccactgtgaaagggaatcaaaaactactgcttacttctgttgggtgagagggtggggtgaaagattagctccctgatgagctcggctgctggaactatgaatgtgtgtgagtgtgtgtggggagagagtgtgtgtgtgtgtatgggtgtgcttgtgtgtgtgtgtttggtttttccattggagtttggctaaagtatgacaggtactttttgctaaaaaggttttctcttgtaggccaacattttcctgatcttctgtctaggaaaataagcctttccttggagcttattttgtctgtgcctgttggtggttctacgttagatgtttctggatattaaaacaacaacgaaaactagggaatttgccatgttgttcctcaagtcctcagattcctaattttttttcttctacctacttcgcaaagtcatcttacacttatttgttttgttatgttcagggctttttaattatagaaagagaactgggaggaataaggctgctccatctctgtcaggatcagaagtcatgtagtgttataaaaaggactttgtctaccattttaaaatagctgttggctgtaagctccttattgtatttaaagtatattggctaaaattgtgggaggtaaggaaaactctttgtaaagtgaactgacatggtgaaaagagagagaagatatgcttgtcaaatattgcgaagtctattcagatcaagctagacatggtctgtattagtcagggttctccagaagaaaagaaccaataggaggtgcatgtctgtgtgtgtatgaaaaggaatgtattagggagaatttgctcacatcattataaaggcaatgtcccacgacaggctgtcagcaagctatagaatgatagaagccactagtatgtctcccaaggaaggtgatactatgtctcagtccaagtcccaaagcttcaaaaccagggaagctgacagtgcatcccatagtctaaggctgaaagcctgagaacccccagatcccccagagaccactgctgcaagtttcagggtccaaaggctaaagaacctagagtctgatgtctaaaggcaggaggaagaaagggcattctgcactggaagagaaagagagaggcagctcacaaagcaagaaaagcctgcaagctgaatatcccccttcttctgtctgctttactgtagacacacctgcagctgattggatggtacccacctacattgagggtaggtctttctctcagtccactggcttatatgtcaatctcctctggaaacaccgcaatagatacatcaagaaacagtgctttaccagccatctaggtatccctcaatccagtcaaattaatattaaccatcacatggcctattcacaatttaaaaatgtagcataaattgcagcagtggtcaagtgtattggcaagttgtaaagtgcctataagaaacctatacacgagcatttgcagattcccttaacacttttcagcaaatattttgttacaattgaaattaaaaggcagtttgaaattgttcctctactaaatatcacactggatatgaataaaataactagatagactaacaaggtacatactttattgcctgtgattattgcaactaccactcctggtggagagccattcttctcaggtgtgcaagtggaagattaattctcaatcaggaatatagatttgatacaaggaaagcatttcacttggcattagtgtgtcaacatttcagctaatttgcctaaccacaaatacttcagggggaagagaaattgctagtgctttatattaaacattggatggagctggcggagataatacaatttgtactttttttacatagtttcaacgaattttggcagatatgtctttttgaggcaactttagatgttgaaaagctgcttgtggatattcaagacttgtctttttttcatgttacaatgaccatcaccatagtttgtatctgattttttttgtgtgaattgaggaatgtggagtcataatgcaaaagtcattgccataattctttgcagatcttatgactggaaattcttgtgtatgtagtttgatattcatttgtaacacatgtaactggttcgtgtaatgattaaaataataagtaatgcttgatcatggttaaaataaataccaaggataaattcttctattaattagtgtaagcttatcctaattaacatctttaattatgggctgttgttaatttttgtcgcaacctattagatatactgtcctaaatcattaacactagtgtaactgagcataaactctaggtgactcacggctacagtggaagcgcccatggaaaatatatatttctaagtacacagtttagataatttcaagcagaatcagaaaattcttgatgaattctaaatttagtataaacagaaatgtattaggtttggttattgagccaagcttcaaacattgaatatcagaattgtgtccatttgcaatgagtaagcatttgattcaagatttttttttgtactcagactcatttttgtatatctttctgtttaagtcatattgtatttactgcgattacagattttttacatatttcttaaactggttctatgttatgccattatataacaggtgataaggaatgtactgtcactgccccttgacaatgaaaaggggacatctctactagtgtatgtgtatgtagctgtggaggagttgaaacagtgtaagtgaaatgcctagaaattgtcctgagttttgattttgtttgtgcttacatttttattagtatatgtactttcttgaatagataattgatttggggcaatatttctcaatcttggcactactgacattttggactggataattattggttgtgcctggctttcctgtgcattgtaggatgttcagaagaatctctggtctctacccactagatgccagtagcaaacctgccacctctctgcctacttccgtcctgtcttgcaatagtcaaaaatgtctgcagacattgccaagtgtcccctaaggggcatgagccttggtggagagaaacttctttacagtctcatccttggcgatgtcatttccttataatttgcgtagttaaacatttttgttttgaggagcataagttgtgataccatacctgtacagaagaggcttggatttaaggttaaccacatttaactgagagaattttatcaaagcatgaaataagaaaaataggggcaaaaaatgaaattctaaaatggcttatgcaatttctaagggtagctaataagaattctgaattggtgacattgtttttaaaaaaagtaaagcattaaaagaatttcaaagataaaatatattttttggagtgtgaacactgtaattaaggagacccaataatgttaagttacttaaaggatgtatttttacttaaagtaggatacaagttggagaaattaacattcggttgattgttaaatattttgattcaaagaaagaacatagaattgtcagcctcaaaaaatatgcttaagatagaaaaataattttggttgcatgaaaagaaaaagattttagtaaattgttgacttgaaaaggggaactatttgacagaagtctcaacagtgttttggagtggcatagtgattggggggtgacatcagatgattagagttaaaaacgactggaccggctgggcgcggtggctcacgcctgtaatcccagcactttgggaggccgaggcggctggatcacaaggtcaggagagcgagaccatcctggctaacacggtgaaaacccgtctctactaaaaatacaaaaaattagccgggcgtggtggcgggcgcctgtagtcccagctacttgggaggctgaggcaggagaatggcgtgaacccgggaggcggagcttgcagtgagcggagatcgcgccactgcactccagcctgggcgacagagcgagactctgtctcaaaaaaaaaaaaaaaagactggaccagttattaggccttaagttgatgtaaactatatgacaaattgacaatttagagacattgtggggacatttctatgaaacgtctgtttattattcattcctgtgatgattttgaaagggcaaataaaatcataatcacatattgtataatgctttttgtctttcaaatacatatacattaaaaatgacttatataaagcaaaatgtacctttttgtgcacaattctattggtttttgtggatgtatactgttgcataaccaccatccaaccaatacacagaagagttctataacttcagaatattcctttgtgctactcttttatagtcattcccatcttcccatccccaccctctattgacccgtaaactgttttctgaataaatatctgggaaaaggattgctgtgccacatggtaggtgtatgtttaaagtttctcagaagttgacagactttttccacggtggctgtaccattttgccttctcaccagcaaaatgtcagattacagttgttttgcatcctggccagcacttggtatggccacttcatttatttatttagctcttcttctgataggtgtttagtggtatctcattatggttttaatttacacttctctaatgattgatgattttccccggtgactgatgatgattgaggatcttttcaggtgcttatttgcctcccatgtgtgtatcctctttagtgaaatgtttgttcaaatcttcccatttcaaaaaatgttggcccttttcttattatgaaatttctatggctctttatgtcttgtgcatagaagtcctctgtcaaacagatgtctgttttgcaaatattttcctgatttgtagcttgtcttctcaatattttaacagtgtcatttatagatcagaagtttccaattcttcaggtctggctcccctccataatctgtttgctttgattcacttttcagcatcctcatgtagttgctttttgtgtttggtctgagattttacttgtgattggcagggagagataggctgaacgtgactgagtggagtatagcatgagaagacttgcataatattttttttaattttcagtgttttgcaaacattatttttgatccattaataatgttaatgattgccattttatatacgagaaaataaaaaaatcaagagtcataagagtttaagttcataaataataaaaagccacatggaaataaccagtgatctaaatcacctggaacaactaaaaccttaaggtattatatcctagtttgtgtgttccgaccacaagcccctagaatgcaaattacttatgtaccttatttaattatgtttgctttacgtaattttagtactttaggaacttccttgattaaatttcaattcatacatttgctgaaaaataactaattttaaaactaagtaaggttattaagtaacttttttccatctggaggagaattgtttttgttccagattctttactgacacaatagtagcacactcgaataagtgcatagtatgcttcatggaagatcatgtgtaaaagccaggcttagtcaatgtttcttctgataatacatgtgaaaagttgaaaagaacctttatggtcattttcctagtaagcaagtcaattccttttgcttaaagcattttaacttcattaatgtaaaagacaatagatatctactatgtatacaacactttttaagagatcttgaggttacagaagatagtaaagccatggtgtctatccttaagaagctatacataataagaaagaaagaaatctcactgtgatattgagtatacatttttggaaagtaatttttgaataaaatcagatgttttaaaaaatcgtaaaaggttttgaatcaacattttcaaatatttagaaaataaatgagaaaaaagacagacccaaccaattccttccagtaattttgctctgatattaatgtaattcccttcagcttttatgtgcatattatatatgttattaaccatagtacatctttaaaacatatataattttgtctgctcacttttttttaaaaaaacagcattgtatcacagtttattttcatgtaccttcatagttcaaggtacaagggaagtaacagagattccctgagagaagacaatggatgttcctaagaaagacctagtgtgagagttcagggaactgctacactttggattttttttttttttttttttttttttgagacggagtcttgctctgtcatccaggctggagtgcagtggcacgatctcagctcactgcaagctctgcctcttggggtcatgccattctcctgcctcagcctcccgggactacaggcgcctgccaccatgcccggctaatttgttttgtatttttagtagagacagggtttcaccgtgttagtcaggatggtcgggatttcctgaccttgtgatccacctgcctcagcttcccaaagtgctgggattacaggtgtgagccaccacacctggccaggattggttttttaaaataatgtagaatgttttgtatttgtccttgcatcatgtaaagatttatccttaaaagtgcaatttgtctttggactataaactctgcgagggacaggacagtacttacatagcatgttaaaaattcaagtatcaatctacccatttaggtctattggctctttactgagtccagggttttatttacatgtatcactgaatgaatggccttaagaaggtacagatgagactactgaggcatagagagatttaacagaggcaagcagagcatcacaagcagtttggaactcaacacatgtttcttgtttgaaaatatgcacagacaaaagagggatggatagaaagttggttcaatataggattaagacctggaacaaaagcacatgggcaccagcagaatctacttgagaggtcacagcgcccaaggggaaacaaccctaggcaagtcacttaacctcactcaccttagttctcttgttggtaaaatgcagagtttatgcaaactcaatacatgtcaagaaatatctgcaaggcattgtttaaaattgaccctctggatttttttcatgcatgcctggttattatttattaagatgtactaggggcaagtctcaaatggaagaaaaaataaaaggcacatctgcaaagtgaagaagtggggttaagcgcaatgcaacagaaactcttatactaatccaggaggactttacctgtcaatcaaatctatattcattttttttaaagattaataatggtttgttaactgagtaagctggcagatggtaaagtaatgtgatgagatcttggggcatctatgaccagttgatgactgactgaccaatttcaaaagatgctatgaaggatcataaagtttagttccatgtggattttgatgatagttgcatctatatttaaagccttctgtcactggaagcactcttggtgttgtcagactgtctattggactggatgagctgcaacttctcgcaattgaatgtcaataagaccaaagcaattttggttgattcatagcaccagcttaagcatattcacttgcacagattacatttgacagatagttaccttcagctgaactctgtggttagaggcttgggcgtattcttgacagtgagcttagagttgatgtctaatgtttatttcatatcctgtttttaccttccctaatattgcatgtgtaaatctatatttaaatatattcacagctgatgttcttgtcggtccacttgttatctctggacagaatgctgtaatgattcaatttaattattttaataaaaataacttgcacccctccagttttaatttcaataaatctgacgagtaatgattaattttaaggagtcttattgatgagcaattgcaacactataatgcaggaaaatgcccaagtggtgggagcatgcttacatctatagtaaacttaaaaccttcaaaatttggtgtgtgattatgaacaccgaggaaatatatccacatttatttaccaaattattattcctgtatcttttttaagttatttaggtccatcagttatcttcaaagtttaggtttgaaactatccatttcaagaatattagccttttaagatgattataatttaaataacatattctaaaatgttttaattgaacagtagaatgcatgtaacccaaaacattataaaatttaaaaagtcacggccatttttgaatatttagattgggaaaacacttaagatgtggttttatgttcaagaagaggtgcaattatggtatggattcattcatcattatggtattgtattgtcaacttttcagttatgttcaatttttaagatgctgggtgggaaatttaagggacatatagatctaataatctgagcctaaatctcctgctctatacaaataactctgcaaagctttggaatccctttatttgactaggtgaatggcagttttgtttgcatcagcctaaacctagcttggaaatcatgattttaaagcaaacacgttttcctcacacatttccatatttcctagaatctatggttttaagatatcaaacaattcaaattatgtagttatacatttcacacaggacaaaaactcatgctgaagtaggtaaaatatttttcaaaattattttctctacatttactggcatactttctctttcttactgtcttttaaaactgacagtcagttttttttatttttctcttttactgacagctagtaaatgtactgacagttcagaagcaagatgtaaatgtaagtcactattattttgttcacctgatacctgagcattagtagaaatgcatggctatattttaaaataaaaactagattatttccaatggttctgaagggaagatgtatagaaaaactgtcctctgtaaataaaaatgtgtttgaggcaagattgcattacatttagaaatagcatactttcctcattaggatgtgattggtatttgtactgaagaaaatgggctaattatttaagtaagatgtatatttactttctgtttcattagctgtaaatctttatagcatataaatctcctttagaaattaatgggaagtatataagtgagggaaagaaagcaggttatgaagttaataaataccatgttaaaaattagtttctacttaaatataaagttcaagattaaaaattaaaaattgttttattttaattagaaaaatcttgcttagttaatttctctggaagaaatgctatataagcagttaaatgtggagaattatattctattgataaaagtatgttgggccagactgaaccaacaacatcatagaaggactgattccttacttcctttaaaaagtgatctgtcatttgtctacattataaataacagctgagttttaaaacacaaggagatttttaaaaagtggcagcatttatttatttactgcttagacagtattcacagtattttatttcatccttaagactctttttttgttttgctcccacattattgttacacatatgggaattggtaaagtgggaaaacttagcatttatagatttttatactgaagcatgcgatgataaagtagtcactttcatccaagaaccttttcctcttttcacttacactagctcttccagaaatggcccctttagtgcctttaatggttttattctccttctgtcactatttttaatattcttattcttatactgccatcatatataactttgtgaaaatttgtcatataaggttaaaattgatttgcctttaaatacagtagtttccattttctgttaactgtttgaagaacacctattgagaggcaaggaaagacctgcgggataagttacaaaaggcaagaattcctcacagaaaaagcagcaggagcttccttgtcaagagcttcagcaagtagtgtcagcagcttagaagttgctattggactgctgagtgttatgcagataaattgtggctctagcttgtcctccgatgtcattctttgatttttctctgttaacactgcatttgcatttgggtctcactgagaacaaggaccagtgcaaatgccttatggcatgtgtagaaagctgcttttatgttaaaagtgatatgttttcttgttcactgtgttcacaacaaaaattcatcttccgagtcttggaattcccttatgtatttgtaattttccttccaagtcataatattcatatacaaagagtggaaatttttctttaaaaaaacctaccaaacaacaaaaacagtaaagttagttggttactagcagcaacaactgaaaagcagcatcaccaaaacatatgcaattcatgggtttccagcaaaagaggaaatctggaaagagaagatccttaagtattgctttaaagtgagcactgaaggacagccgttaaaacaatcccaatttttagaaaaggtattattccctgacatttacttgttttattcccttctcaatctgaagacacattttggacagatgctcttgtcttacatgaacattcaattcatttgagaaaataatggttatacttaaactcgtgaagtgaaatgtatggaagtctgttgctttataactttaaatagccatgtaacttgttcatggcagaatatagtcaagtcctgggcaaggactttttttctcttctccaataatgctattcaaggggaagctagttattgtgtgacacatgcttgattctcaggaggtttggacaaaagagagggttagaaggtcaggagagcctgacgctattcaactagatatttgagtagaattcccacaccagaattttgcctcatacctaattcagacagtgtaataatgggggaagggcagagagagggagggcagatggaggtgtcctttcaggttaaatgttaaaataagggtcttcatttctgtctctggtggcacagagcattaaaaaccctgtgacacattttggaagtgttgctataaaatagattttaacgtttgaggatctataaagggtattattgagtacttaatagattctgtgtttgcctactgaaatcactacaccgccgatatatacctcattaatttgtaaagcagtttggcccaacttgagacaatgtactgtattaaagcaaagtctatatcccaaattttcatggctaataattacaaaacgttcagcatctgaagaaaattatctaaatgtgacaatattggtcttggatagtttaacttgcgtgaaatatttcacacagaaacatttgatctatattgaagagttgtttcttttttcatcagatcagctatatcacagtaaattgtggaaatagaaaatggaaactaaattgttgaaaatgcatctgatagtttgtttttattgccaaaatgtcattgtccttgaggtccatcactttgtagcttagtaaaaacagatttaggcattgcaagtgagaagtcattgactgttttccttgtaaccaatttatttatcaagttggtaagtttcagaagtatttccagtgttcagcctatttcttcacttttctattttccaaattatatcctattacttcaaagatgtataaagttcacacattctggattctttatctcttttattgttttctgcttcatacaaagtaattaaattatgttcttgaagtaattcctcctatcttacttaaaatcaccttcatgatctgtcaagagttttcaagttgttctgtgataaagttcttagagtttgagaagctaaatggtggagttggtgcttaagctcttcactgaaagctgcaagagtataaacgaagtcagaaattactattattattatttttttctcattgagacggagtctcactctgtcgcccaggctggattgcagtggcgtgatctcagctcacggcaagctccgcctcccgggttcgctccattatcctgcctcagcctcccgagtggctgggactacaggtgcccgtcaccacgccaggctaattttttgtatttttagtagagacggggtttcactgtgttagccaggatggtctcgatctcctgaccttgtgatctgcctacctcagcctcccaaagtcccaaagtgctgagattacaggcatgagacaccacacccagcatatatatatatatatatatatatagttttttggtttttgttttttgtttgtttgtttgtttgtttgtttgtttgtttttttgagacgagtctcgctctgtcgcccaggctggagtgcagtggcaggatctcggctcactgcaagctctgcctcccgggttcatgcctcagcctcccgagtagcttggactacaggcgcccgccaccacgaccagcaaattttttgtatttttagtagagatggggtttcaccgtgttagccaggatggtctcaatctcctgaccttgtgatccgcctgccttagcctcccaaagtgctgggattacaggcatgagccactgcacccggcctgaaatgactattctttttaataacttctatttattgttttgtgttattcataattgttgtgcaatttaatttatttcactagtagaacactatgtacaggactgtactgtgtggaggttttagaagtgacaaaaccagttaactaggctcttggtccaaaggaatttagtgaaagagataagacataaacactaatgactgtaacatttatggaataataaataggagctgctgaaagttgtgatttcttctcattatgatagtgcttcttggattataaaaaatttaacctagaacatgaggtttcaagaggcagagatggggagagaagaattccaggtttgggactaggatgtagaaaggcagaaaggtgaaaatattcttgtgatgatggcaaacagtgactggtcaagtttgccaagagtaggttttatgcaagagcgtagtaagatgaaaccctgaaggaattttactgtcagatgatagaaaccggaataaagctgaggatacagttcaataatcaaagggaaccaaatgaaagttttgagcaaagaagggatcttattaaaacagccttttattatttcttttaagctagaggtagcttggcattatctgtgccagctcagagtgaccttcaccccaaaattctagttggattatggagcagttaatcttacaggctctaataattctgtcaccctttgttgtcattctatatctgtgtcccttcagttatgtgtcttctcccatattctcataccattatttctctgtctttcatttctttactttcatcatccacatcaggacaatgtttttattctatagtagtttgtaaacatgtcacattctttagactttcaagctctttgtcaacagtttttcaaagtccttgccttacataaacactaattctttccctttagggacccctttcctggcccttccaagcaaagggtgctcattcatccactcctcatgcacctcattgctgggagcaagtagagatgtagggattgctttcttctttttcttttacctcatattggaaagagatgtttcctttaaagctcatgttaagttgttgtgtacctttcttcaatttttgcatcaatttttgcaaaccttgcatcaatttttgcagctgctgacaccttggataccccagccacctgcctgccagatacaatgaaaaatttcacctctgactcacagtgtttctctgcatcattatcagcttttggttaatgaccatgaagcttcactttttcacctcttgaaaacttttggctacagaatgaagttaagcgcctaggtgcttatattgtctttgagtctgttgggttccttctaggttcagtttcttcacttctagcctagcccacaaggaaaatatctttagtagtcttttaaccattttcttttatttcattttttttcattctgttgccaccagacacctattctcaaatcattcacctgactgccttcttaattcctgtgtatagattgcagaatattactgaaaaaaaacaggtgtgtggattgaggccactaaaaattaatgatttccaactagagatggacccttagtgcagccttagggtaaatttcagaggtgcagctgattcaaagggtgtgcacaatttcaggggtatattgacctactgtcttcagaaaatgtttgactagtgcagactcctaccgaaagagaatcagagtgcctattcctcaaattattgttaatataaggaattatcttttctcatttttttctaattttatgggcaaaatagtatgagtgtattcttatttcatttagcatttcttcccctacctcgtacttatcttaccttacataggcttattagccagccacatgtattttttgcttctgggtaatagctgtgtattgttctcttatttttttaaataaaggggtctgcatttttattaatgactaagaaatcttgatatatttagaaattatatgtaaaaataattttaaattttttttattctactttaagttctggggtacacatgcagaacttgcaggtttatgtcatagttataaaaaaagaaagaaagcataggcagagaaggaaaatcactctggacagaaaaaaataattggttaaaatattaaagaataaaatttgtaggtaaaaataataaattttaaaatgacagtttaaaaatttatatgtaggctgggtgtggtgccccatgccgatagtcccagcactttgggaggcctacgcaggaggatcacttgagtccaggatttcaaggccaggttgggcaacatagcaagacgtcatctctacaaaaaaaaaaaaaaagaaagaaagaaagaaagaaaaaaaattagccaggcatggtggtgcatgcctgtagtcccagctactcagaaggctaagatgggaagatcttctgagcctgggaggtcaaggctgtgagccatggtcgtgccactgcactccagcctaggcaacagagccagatcctctcgcaaaacaaacaaacaaacaaattacatgtgaaaagaattatacgtgaagataataatttcagacatacaatcctatgttaactcccatagaaaattaagggagttatcacacctttgcttttaacaattctttctcttcccacattccagttttgttgaaataagcagagcttcttatcccagcttattgtagcaaaatcattatagtaaaatgatatttttatttcaagcattacaatagcactttataacttatttaaaaatttatatgatgttaaaaggattcaatactcattgagtatcctttcataacatacatctctaatttcttaatttgaattgagctttctatttggtgagagtatttctattctgaaaaggaacatggccagtgatgtaccttctgaatctttgcgtagttgagcctgtctttctaatgcctgtacccatgaacaatgtctggatgatgatggatttttttttcttataccctttcgtttgtgagcttttaatacattgcatcgtgtttctgaagagaaatctgagacaagcttaaggattatttttcactgtgggtgacccgtttttgtgtgcctgagtgagattcttacaggtttctttctttatccttaaaatcccaggactaccagcctatagtttggtgttaattaatctttgttttcttgagaatatggtaagcttttcttagctgaatattcaggtcatatttttaatcccttaattttggtttctatcatgtctttgagtttatattttcattatttgttttcttcgggctttcatcctgtgaaatttagtgaccaatatagttttattccttttatgtccaagatacataagaagttgtatgtactctagtgtccattcgttcatcaacttattccaattaccccaaacccctatttccaagggcttttcttcttccgttcagactctttatttgggtcttttcgtggttccttgcttaacactatgcacttttcacggcacacactttccctgggaattcttactcacaaccatgactcctagtactattttcatatgcatagttataaaacctgtaatttctaaatttatattgccacagtgctatcagtgagctttcaaaattcaaattcaagtatgatttttcttagttttaagatttcttcagttggaatggagacccttaatgacttagctctgacaactgttcagcctcatgttctgtaaggtctcctctgggacctcacattctagtaacactgagctgtctagtctttaattgtatccatctttcttatgttgctacaactgcacatgttctttaccaagaatactctcccttactatttattccgcttaatcctactttttcctttcactcatttggcatcaacattttcaggaagccttttcttatctcaaaatctgagtagacatgcactcatcctttctatgaaattatcgcaatttactcaatgtgctttatttgtgtccatcactagactccagaacttttagatcaagaattttaccttatttagtgttgttcccttcagggctcggcatcatgtttgaatgtgatccattctcaataaacaaagtttgattgaatgagtgatggcatcatccagtattagaacaaagttgataggacagtttgtttagaagctcttgcaagaatacagttgacccatgaactacaaggaattgaattgcccaggtctgcttttatgtgaattttttcgagctaaacacagattgaaaatacagtacttgcaggatgtaaaatccgactatgcacagggccgactttttgtatccctgggctccgcaaggctaactgcgagacttgggtatgattagattttggttatttatgcctggatcctggaaccaatcccttgaagactgtacagatgagagatattagttgatcgaatatgtagcaggagaaaactgaaaaaggaaaagaaatttatgaagtaaattaatgagaccgctgcatttcattactactttggagattagaggaacaataaaggtgactttaaaattttgaaccaacttctttataacatggcttacaagtggtagctagaaagaggagggttggttacttttgctttgtatattgcaatacatttctgattgttccctttccacttttccccctagtattgttgattactttgtctttgtaaaaaacttcatcgtgaaaatttctttctaaaatgtaaatgtgattacctccttcctctccttaaataaacactatgctcacgattgctcacactccagagaatgaaatttccttcccttagcaacatgttcaagatccttcaaaatttgttagatggtgcctctatagcttcattgtccttctatgtactttgagttttaaccatgatatttttttgcctcccaaaatcatgtactttgtggttttcatgcaagctcttcctgtttgccttattcagttgcttctagcttgtacacttttccctctccctcttcaactccatttctttgtgtacgtatctcaatgaccaccacaaatacaacttcctctgtaaaacacactaatttcttctctccttttctcctctctgctcctatagcacttttttttcttattggctgtatgacatttattacataggcatattttattagatattaagtaggttttgcattaggtatatttttgaatgtactgaaaggcagatactttattcattcatatgtgctcagaagagcaaaatatctcttacataatgtatgtttaatataagtaaatatacaaacaaatagaaatattgagtttggtaaaagatgatattgagaaaaagtgatatgtgatagaatgaaaagctacatatattttctaaatgatgggtggacatttacaactttgctaaattatatattaaatcatctctttatcctgaaaaaattatcttttccatgattagtaagtactttacagtctcttctaggttataaagctcagtactctaattagttttagaaaaactgtgactaaactagcagtactgttttttctcccatattttgtctcacactgaagtcagtgatatttttttctgttcacagatatattcactcttagccttccctgagctctattacagcctggaaaataactggaatttcctttaaaataatacacattttcttaacttatcatattaaatgaaaaacacacaaacactggcctcctttcacattccctagaactttttgttttttctgtatttggcatttctgatgtctttaattttttgtgattctggctctgtattctggtgcctggaacagtgttgcttccaaataaataggcagtagtgatagcaatactcataaatattttaagctatttggaaaaagatattttttagaagctgtgttttgaatgaccttcccatttaactacagtgaatttcattcttagttccttcccaatatctaccctcttgcatcttcttttatgttgtttctaacgtcttttgcggtacctatcaatttactgtcatctactgttttcattaagattgctacttgtagatcattaataaaaaggtgaaataaaactaaattccttatcaattctctccttaagtcaataagtatccagttttaaatgacagtgcttgaattcaagttcatattaaatgttacttcaaataagtttgggagtttacacatacatggctctttggttcaattacatttgtcttatttattttgttttctgttcccttgtagtattctttgataaacttgtcctttaaaatatatattccaactaaactctgcttagggcctaagtggtgtagccctctggggagggtcgcaaatgtaatttgtttgattggatactcaagcttttcaattgttttcttttccttagagaaatagaacctttctagctttcaggtcaattgatgtaatggttggattcagatggaatgacactttctccccattgtaagtctctagttcctcagagaaatccttgggaaatctgttgacaacttgctgtcatccagctgttctgatggtataaatgacttagacactgattcctggtagtttaaaagtctaatggaacagtgaaattttgagatctcaagtgcatcatgaataaagcacttaagtagcacttgtatatacttcttacaatttgttaactggttttctgctttttttttttgctggagaaagagatttacagttttaatctgattagacattagcagctggttgaagatgctattactgtgaagtatggaaaagaacacaatcatgatgaaaactttttactcaaatccttagaagaagaaagcagatgaaattagattggcaaaggaaaccagcccaaattacacacaggagagaaatgtagcagaggagagtactgagttggtgctgcacgcatagagcttacagcctccatgggcaggggacatgtgggtgtgactgccagggacaggaattgcaaacagcatttggagtgacagtctgggtcagcttctcatgctctttcccatcaccaggcatcagcgagtggaaagatttgacctgattttggagcacagagtgtgggctctaaggccacaggaaggcaggtgaatgggactaggatgtagtggagtccccatggctaaaaaataagttgtattgcatacctgcctttgccccacaattatcaaatccaatctagggtgaatagaaacacatctgcagacagatccaatgtccacctacaaaaagtttcagaaaatgaaaacagatggagaaaaaaaattataaaaatataaagaattctggtaaagttgccaaaagaaatgagtcttctagtcaaatgggctttgttctattagtagatgttgagacgaatgcagtgaattgattagagctgatgttatttgtttgggtgcatacatgtgtgcctggtgaggggtgggtgagggaagaaaaaaaactcaaacaaataagaaacatattgagagaaaaataatacctagagaattaaaatagtacactataacaaagtttgtgagtgattattaaggcttgtgtgggtattcgggggctctctgaggtgtcaatatgtaaactgagatctgacagtaaagactcagctaccttatatctcttcatccctacatcttgttctaagaaaacatcagaagtcctgtgatctcagcataagttgaaaactcgtaagtagtcattcaaaggtggatttgtggagggtagaggtaaactaccttgattatatttacatagaatggaagtgatgctaatttagaaatgtccattgctgtaagtcttaggagatgtaaagtaccaatgaaagatcctgaacagtattatgtgacagaaaatgagcgttacacttttaaaaaaatattagatgttgtaactttagtcattctcacctttaccttttaagtatttcaccatttaatatcaaccttcattattgatttatttctaaagatatctggaaatagtttaggctcattaattttctttttaagagtcaaatcggcatgcaaatgtttctcccaccaagaaatttttttcctggacttcaccttctgaggcatgtccacctttgaggcaagctaagccaggctttgtgaaggcagaaccatccgaagcacacagccccaccaaatttctctccctccttccctccctcccctgttcctctctccttctctttcttttttctctttctttctctttctttctctttctttcttccttccttcctttctttctttccttctttctttctttctttctttctttctttctttctttctttctttctttctttctttctttttatttctttccttctctttctttctttttatttctttccttctctttctttctttcttttttttttctttctctttcttctctcttcccccctcccctgctctcccctgctctcccctccccttccctttctttcagctgctgcttacctggggtaacatggtttgggaagaaacatgtcagaattggagtgaataaatataaatgataaaaagacaaaatgaatattattttcaagagtaattaccagtatgaagttcttcagatgataacaaaaactattgacttattttgtctaaatcaatgccactatcttatctgtgtgattgtgaagggaggaaaggaaactgttcactgaatattctgcatttgacccgtaaatacctacttttgtattcagggatgatatattcttaccttaaattaatgactgttttctactgttcttttttggtgcaaacaaattaaatgtgtgcacttctccatgactgattgtgcaaaaactgcttagacaattactatctctctagcttttgatcagaaaggactaccttgaaacaatggccacaataatggtattattctcaattctagaatttatttaaacaaacaattcaaatcatatttcataatacagttctctgaaggagcttaaagagattcagatttttccttttgtttaacatggctcttcatttagtttttgaggcatatttttaataaattttgctcagtactgtctactggagctgaaaaaatctaagaagacacaaaatggctgaagcataggtacttacagaaaagcatgcctttcttttaagaatataaaattaatacattatttatttattatataatgggatgttctacccttgttgaagattttagcagatataactcatgcacagtgtaagtgagcattcacccctgttttgtttatatggcaggactatttctacaaattttacaaattactgtttaggatctttatgacatccattgagtgctggcatgataaatgattttctatatatctgtctacatattgagggcctgattgatggcccttctgacttggggtcagcagtgagttcacatctcttggtatactttggcttattccctggaagtataaacagaaatccaatgaccactattttcattattttccttcaggcataatctgacctaatgatatgtaactgtattactgtgatttaagagatttttaaaaaactataaacattttgaggaaaagtgaaaatggtgattttaaatttaacacatttaaatattcattttatgaaaagaatatttgaaagaatagggatttatcaggatcaatagaaggcttggagtaacctaatcattttaaattttattccttcttgtttttttctgttttcccacaacttattcactaccctctatattctcatactttgctaaatcatattaatccttcaagagttggtttagatgaagcttcattcatttgataaagattaaatgagtgtccagtagttgctagctcaccttgttctgttgtgcttcacagacaatgtgttttatttttatttttattttatttttttacaaagtgaaggtttatggcaaccttgcttcaggcaaacatgtcatatattagtgctatttttccaacagcatgtgctcgttttgtgtatgcttcacattttggcaattctcacagaaatttaaatttttttccaatcattatagctgttatggtggtctgtgatcagtgatttttgatgttattataatttcagggggtgccatgaaccacaccaatatgatatggcaaagttaaccaataaatgttgtgtgtgttatgacttctccaccgacagaatgttcttctgacttgttccttctccttgggcctccctgttccctgagacacaacaatattgaaattaaattagaccgagtaataaccctacagtggcctctcagtgttcaagtgaaaggaagagtaacatttctctcacttgaaatcaaaagctagaaatgagtaagcttagtgaggaaggcatgtagaaagttgacaggttgaaagctagtcctcttgcaccaaacagccaagttgaatgcaaaggaaaatttcttgagggaaaattaaagtgctactctaatgaccacaaaaatgataaaaactgaaacagctttattgctgatgtggagaaaatttgagtggtctggatagaagatcagaccagctacaatattctcttaaaccaaagtctaatccagacaaggccctaactattccattatgtgaaggctgagagaagtgagcaagctacaaaagaaaagttggaagctagcagagattggttcacaaggtttaaggaaagaagtagtttccataacataaaagtgcaaggttgaaagagcaagtgctgttgtagaagttgcaagttatccagaagatctagataagatcactgatgaaggtggctacactaaacaacataatttcaatgtggatgaaaaagtcttctgttggaagaagatgccacctaggactttcatagctagagaagagaaatcaatgcctagtttcaaagctccaaaaataagactgagtctcttgttaggggctaatgcagttggggactttactgcacaggtggtaggtgccctaacccccatattgttaaagggtcaatggtttatagaaataatatagaagtaagtgtgtgattctatctaatctatctatctagtagtatctgtctatattcatattccctatatatccatagtccctacagccatccactgaggggagagagtgggcctgggagtagtaacactgaaatagcacgaatctacttagcaccgaatctttgttcctaaagaccactcatctcttagaggaaccaggattccttggagaaatggctgattccagggctgtggtggggaagtacaaaatgagcctagaacatcttgtgtcataaagtaagaagatacttaaagaattattagaacatgtcaatatgatccagaatgcagctgtatggggtctatactgtccaaacctggaacaacttgagcactgaaatacatattgagagtaattaattatatcccactgagtaaaatagagactcatgagtctatatagataaaaataagcctaagcatatattgaatttttaataagcaataggatatttatacagtcttgaagtatctgctcgcaaaatgtttgctaattgcaaaggggaaaattgtatttttacagtgtggaagcctggcagatatattaatgcaaatgattaaagttaacatcattaataatggaacaaatagaaatgatgtaagacatgataagatataatatgatcactgtatcacctgaatttaatcatgaggaaaaattagacaaacccaaattgagaggcaatctacaaaataactgggcggtcctctttaacagtattaagatcagaaaagccaaggaaagattgaagaactctttttttttttgggtcggcactgcttttttattttattttattattattatactttaagttttagggtacatgtgcacaatgtgcaggcttgttacatatgtatacacgtgccatgttggtgtgctgcacccatcaactcatgatttagcattaggtatatctctcaatgctatccctcccccctccccccaccccacaaaagtccccagtgtgtgatgttccccttcctgtgtccatgcgttctcattgttcaattcccacctatgagtgagaacatgcagtgtttggttttttgtccttgcgatagtttgctgagaatgatggtttccagtttcatccacgttcctacaaaggacatgaactcatcagtttttatggctgcatagtattccatggtgtatatgtgccacattttcttaatccagtctatcggtgttggacatttgggttggttctaaatctttgctattgtgaatagggccgcaataaacatacgtgtctctttcagatcaaaagaaaacttagagtcatgacaactaaaggcaacatgtgatttggggctggaggtgttttttctataaaagactttttggggtcattgacaaaacttgaatgggctttaaagataaaatggtaatgatatacgaataactttgatgtttacatcgtgcttatgtaaaagaatgtctttttgtagcaaatacacgttgcggtattcagggggaatgggtcattaggtcaaaaatttaatctcaaatgggtcagaaaaaattctttgtactactcttgtgactttcctgtaacgttgagatagttattttttaaagtaataaaaaacagaaactactgattgagctgcattacagatagaatgggaaaagagaaaatggacagaggaagtacaaacaacttacttgaggaacacctcaatagagagaagaagagtaacagggaaatatttggtggaggagacttccaagatattttcacgttctcatctttgttcctaaccactttattcatatttatttattatattgcctcctttcattgaaagtattttatacgccatttctattacagattgtaaattccttgaagaaaaggtctgtgctttatataccccttatgtgtagtatatgtagcatcacacttagcatatcataatgtgcttgtttcatattcaaacaacaggaccattttcaaacaagtgattggattttagtgagagtatgaagagcagttttctttataaacatgggagacaaaagaggttgactcacttttaaggagaggacattgtagttataacaagtaacttctagctcattgggatgtaacatgctgaaaaagttttctaaggtattttacagctaacttgataatcttttggaaatcatctgttctccatgagtaaaatagaaaaaggcacaatgatatattgaaataattaagagtatctaatattgtgatgaagtgtgcaccaaaagctttcttaaatgtagaagtgtacatgacacctctttaagcagtatctacaaaaaaccagctggaactctccctattccttaggaattcaataaatcagactgttggcagattttccatcatgtatatgtgtaaattaatagcttttttttggcagtagagagaagagagtaatctaaatgtgtaggaagaagaggccatgagagtttcacatccagtcaagataggacaaaaaaaaatctacttgcattcctatgttaaatttttaaagatcaattaaatggagacttgtttggtggaggttgcagtatatgaagagctttaatagagatgaggggagaacagcaaatccagagaatcatacccagggcacaaatgtaatacacgtaggctttttctgtagattgcttcaagagcctggcttggcttgtctgagttactcagagaggaaaaaatgaaagtgagtgtatatgttggtttggggtgtgtgaaggtgtgggaatggagagaagtggacagagggaaaatgtgttgaaataaaacaccaggagctcatggaaaatgcaaaacagaaacaaaaccaagaaaaaatctttgaggggcatacctgtgtatgaattcatttttccatagcacctttaacatagtcaaaacaaataaaatttaagcagttattcagtcaaactagtagcaggtgcacacacacattccaaacattacaaatatttgtgggccacccacctggttaatttctgccaaagcaactatccctgaataatttcctcaagtacttattcatattgtttgtataaacgtcactcaatagagaatatttaataaactggagcatttataattatataaaaattcatgtcagtaaacaaggccactctgaaaagttatgtgaagaatcacagtatgacacattttgttagaaaacggtgccttttctttattgcttagagttgtaacatcacatagttcatgttgttgttttcattttcggggtatcaattagttgatcaatcagttagtgtttattaagcttctgtccagcaggtaaagcatgctcatcaaatttgcaaatgacataaatgttagagggatggtaaaggcactgcatgacagacatagcatccaaaaagattttgacagctcggagcaataggctgaatctaacaagatgaaatataacatagataaatataaatgcctacctttgggtccacaaagccaactgtacatgtatagcattgagtagatgtgaattagctgttgatgtaagcaggaaaaaaaagacagtattttagttaatagtcagctcaacttaatttatcagttttagctgcatgatgtcattgccaaaaatctagcctgcaattttgaattgtattaaggtgacaatcctgtaccagtttgacaggtcagaccacatctagagattgtagtatttctggagccacattttaagaagagagacactaaaaactatgtcatatttagaacatcacagaaactaaacacatttatcctgaagaagacttaggagaggaatgacatccttctttacatttatgtaagctctcacatggaaaagggattaaatttgtttggtgcagtctcaataattagaactggaacttgtgaactgaagttataaggagatacctttgggttcaatcatttataataattacatataatagtaaaagctgttcagagagaaaggcgttcccaaaatctgcagaggcagaatactagcacagtttagcctgagtgtcctcctttgcaaagtggggacaacaccattgtgaagcagcgatctgggaaggcagtgggatgatatagggaaaatgttcagcacaatgaggggcatgtagtaagtaagtggttatagtacacaggggatgtcacctttcctattgtgggaggtggtgacaccaatcctgaatcatcactgggtagaggtatagaagagatgctaaatggatggatttgacaaactgactgttacttcaaaaccctaactgactgcaacttattaattaaatttgccatttaaaactgtctctgaaaccaccagtcacgcttctatagcaccttgagtatttttttttttttttttttttttttgagacagagtctggctctgttccccaagctggagtgcagtggcgcgatctcggctcaccacaacctccgcctcccgggtttagcaactctctgcttcagcctcccgagtagcccggattacaggctcgtgccaccatacccagctaatttttgtatttttagcagggacagggtttcaccatcttggccaggctggttttgaactctttacctctttacctacctcgtgatccacttacctctgcctcccaaactgctaggaatacaggcgtgagccaccgcaccaagctattctttttttcttttttttctttttttggatagagtctcactctgtcgcccaggctggagtgcagtggcgtgatgtcggctcaccgcaacctccacctccccggttcaagtaattatcctgcctcagcctcccaagtagctgtaattacaggaatgcaccaccacaactggctaatttttttgtatttttagtagagacggagtttcgccatgttggccaggctggtctagaacttttcacctcaagtgatccgcccacctcggcctcccaaagtgctgggattacaggcacgcgccattgtgcctggccaaatttttgttttcaatcctctgtgcttatttttaattatctttaaaatggagaaaaaggtaaacctgccttaggtaactgtaaagttaaaaagaatgaatatgcataaatattttagaacaatgtctgacatactttttttttttttttttttttggcagagtctcactctgtcacccaggctgtagtgcaatggcgccatcttggctcactgcaacctctgcctcccgggttcaaaagattctcccgcctcagcctcccgagtagctgggactacaggtgtgtgccaccacacccagctaatttttgtatatatatatattttttaagtacagacggggtttcactatgttggccaggctggtctcaaactcctgacctcatgatctgcctgcctcagcctcccaaagttctaggattagaggtgtgagcctccatgcccggcccatactagctttttaatatatgttaactacttttgtaatgccaaagtaggtggcaaaggattattggagaagagaggacttgagatgtgtgttttgaaaaatactaaaaatttagttaagtgcctatatggaaatagcttgaacacatcatgagattaagtggtgtgtgatcgtcagacagtgaggagactttaccagttagattggaggtcggctgttggtgaaggttagaaataaattgggtgagatgagtgaggaaaaatctcagaaggccttaggtttaggatggtaagcaataggatgggatgtgtggggattccacgtgttcgtaggtaggggaatacaacatacatgtgatttttaaaataaacttatagagttttcaggatacattgccttactttagcttaaaaattatggatggaatagtggaatctttttatgcaaatccttctttcacttagaaatagaaatttctatttcagggcaatttctatttcagaaagtccaagacttttctcctccataaagttttctcttctgattcatattacagtggttttctttttgtttgaatttcttagcattcaaaatgatgttccttatatttgtatcatccatcatgatcttttaaggggaaatttaaatttaagatacgttgtcaaatcgcttaatgttaatctattagaaaggtgttattctgaatgcataaaatggttttgctttaaatgaggccctccaaattaataaaactgctcttcctgggaagcttctaagttggttctgggaaagcaagtcacacagagaaggtccaaaaatacgttatacaccacatatattaacaaattaagacataatttctcaaagcaactccttggaaaagataatccttcttgactgcattaagattcagtatttaagttagaaacaaccatcatcatttatagtgattcaaacactatctagcatattaaaatgtattttgttgtcatcatacatacaagctccttgagagaaaggatcatgacttaactcttgttggtgtagctcatagggccactgtgggtaccgagttgatgctttatgaattcagtttaaattagaagaatgtaggcaatgggattaccatttgtccagtaacaaattcagcacaggtattctgtctctctatttcccagcctgagtcagcagtttcttttagttctgatggccagcaggagtaaaatagcagcaaagatctggcatttcagtggcacaggtgattgtggaaaattactataatctaggtggactcgattctattttccccttgctaggtactgagatattgtgtaactttctggacttttgaattatacttctcactaatctagcatgagaatgggtggatagtgtcaagaattctacttaaaaaaaaaaaaatctagtgtactcttgtactcaaagggatgagtacaatctatcacagggacacaaatgtgaccaaaaaagtggttaaaataaaatatgaaactgaagagaatgaagatttgagcatgaccttctctgtatcttctttccaaagtgttttcggatctcttatgaaggggatttaaaggcttttctacaactgctactgcttttgtcaattcattcattcaagacacaccaataaacatgcacgagctcctcttgtcctcatagggctagagaatgagataggtgcaaagtttattttagcagaaggctttcttttcacaaatcagaaattccattgtatgtattcccttaaataactggcaaggggaccatcggaatgagctatggcaaaaatccacctcagtctttacagcttcagggtgatggggccccagatcagaattgtaaaatagtttagagaatcttggaacataaaacatggtgcagaaaaaccaaggaagatttaatcttatgtatggaaaggtggttggtagtggagggggcaatggaagagagtggcttgggatcatcattaatcattatttaagtacctataaagtgaaaatatccttctggaattcactgcaagtgacactgaattcttctactaagcaaatatgtgatgagttgataaaaaagaaggtcctgaactcttgacaacagatataatacagtgaatacagaaaatcaaaaacatgctttctatctgactcaaaataaaggtgcacttaaacttgtaaaagacaacatttttatttgaatgatatgacagaagtgtcacgggagtgttacctgctataaagaaagcctaagaattattacctttattagaccagtgacactgagctttagccatacatttctaacttctgtccctctacagagacaattttcttttcttaaataaactgtcatgctagtgttaatatattgttggctctctcatgctctgagaatactgctgatataaaacatgtatatgttagattggtaatagtatctttagtgtagctgactagaacaaatgtgtttccctcatggctgtgctaatgtgataaaggaaaattggctgttcatcagcttttggctgggtaaagacagtagagatggaaccacattcttttttatgcattaataccactgagaacttttcactagttatatttcatgtgcctgcatgttgtgcaaagatgttgtaaaacatgagataatgctacaaataacaaagtagaaaagcctgtatcttttataatgataacagtcaaacaccaaatgacagtaacaggctgtaaaaaatgggatgcaaaaaaaatgcagccctactacccaacaaagcggaatatatccaggcccttgaggacttggtatatgatttgaggtatattaaagctttgttttaaaattaaatcaaatgcaacactagatcaatggatttaagaaagaacatagtttaaatgaaagtagggtggttagaatggagaaaagccattgtgggtaacttcttgaaataatccgtattaccaagtaattattgtagtaacttcctgttttttttgttttgttgtgttttgcttgtttttttggggggggacattgaaaaagatttttaaggcaatagtacacatgattttaagatgtttgagaataaatgtttatcttcattaattattgcaagtctttttaacataaaagcattaaaagtataaccagtttcaggctcacagcaaaactgagtggaaatttcagagatctcccaaacatgctgtacccccatgtacccacagcctccccctctattaaagccctgcaccagagtggtatatttgttacaattgccggacctacactgatacatcattaccactcaaagtccatagcagaatagcatgttgaatgttttgctatcattttaattaaaatgttaacatccaacctttcctttgcatgaccttaaatctcactctttcctcccctctctcaacccctcccctttccagagccttttatttgccatttcagctccttcactaattagagtaccaattattcctttttcatttaagctaaaagcacttgaacaaaaagactatttgcagagatgaagttgatgtccaaacagctgattagtttatttagaagtgtatgcaattaaaaattttgtgcaggtatctatgggtgttttccataaaagtttgatagcattggctattctgggctccagtcgcataaacaaaaatcccatagctttttaatcatgtaatccaagagttatcaagctacaacctgtgggtcaaattggctggccacctgtttttataaataaagttttatttggacacagccatgcccatttgtttatatattgtctgtggatgcttttgcattacagcattagagttgggcagttgtgacagtaaccatttggcccataaaaccaaaccatttgacttgcagagaaaaaaacattctctagctatttacagaaaaaaaaaattgctaatccctaatatgtgcagttattaggctacttgcttgattgattagtctagaatatgattggcaactttttgttaccctacattggaaaagtatatctgaaaatcaccaaccggataccaatacccaagacagtaaattcaagaaatatttgatcctagtaacttgaattatatccacatgcaattctttgttgttatatctggttttaattatttctttcccttgtactcattttgctctatttccaaatatagccataacaaatttaatttgtatttaaagaagtaacatatcctcaaaaaccctgtaaaacatggcaaccagagctgttacatgtatgggacaaactattatgtatacctgtgaacaccctgggagatatcatcacagcacaaaatgacactatataggtttatatctagataaacacatggagatatcactgagctattaaaataatgttttcagtcttcccagctgaacaaagtaaagaagaaagaaagttacttaataaaaactgctgaaatgtgtttaatataaaataaaagtttatgcacttaaactaataatggtggtaatttcttacaggtgcatcagacaaaaatcagcttctttatcaatggcgtggagaaggatcatacacctttcaatgcaagaactctaagtggttcaattacagattttgcatctggtactgtgcaaataggacagagtttaaatggtaagtttctgacttcagaatgttatttatttcatccaattacattgttcttaaaaatgcatcaaacaaataatattttaaaatatctacgtgtattcatcttctagggctactgaacaaattaccaccaactggatggcagattaatgaaagtaaaatttattttttcacagttttggaagctggaagtcagaaattaagggttcagtggtgttggttccttctggaggctctgagggcaaatctattccatgtctctcttcgtggtagctactggcaatccttagtgttcctttacttgctgcttcctaactgcaatcttgcctcagtcttcatgtggccttctcctctgaatcttctcccctttacctctgttataaggacacttgtcattggatttagggcccactcacagtcaggaggatctcaccctgagttccttaacttaattatacttgcaaagaccctttttccaaattaaagtcatagttacaggttccagatggataatagatcttttgggatctactatataacttactacatttgggaagctttcaaatataaacttctttattctgatcagtttttaagtaatttcaatgtgtaataaactatatttcctttctgtctcttttctgaggggtttgcattttcatgtagagaattgttaaagtagaactacgaagtattagatggaacctgagaaatagtattgacatgtaattaactggactgatgtttacatttactacattaaaaatgggccatatagtttaagaagatatcatatactatatattgaataaaaccagaagttgaaataagaaattatcttgaaatatctagtacagtggtctttaaaatgcctgcatattaaaataaaaatagtattttatattattatataatatatgctcattataaaaaaatctaaacaatatggaactctgtgaaatagaaagtattttccatatttctatcttcagagatagatataatttaacttttttatactcctacagatttttagtacatttttagctagagatatagttataaatacatttttccaaaaataaaattacaatacatatgcttcctctgagccttctaaaaataaatacttctccttcaaatgttataaacaacgtttcatgtcaatgtatcttctcatttagatatatgttctcatttaaaatggctgtattctatgcaattgtatagttgcaatccatgagatttcttaagctcctataatgaacatttaggtttttttaatgtttcagtgcaattagcagttattttatggaaaatattatatatatatccacatatatttatatatctgtgtctatatctacatttccatttatatatatcaaccatcaatctatcaatcatatacatagatgtatacatacgtacatatgtatttgagcagttgcctgattgcacagttccttaatatcctatttggtgccaacctgcgtgaattcatatcccatttcctcacttactagctatatggcctggcaagatattttaatatctctaaagtgtagtcaccccaactttaaaatgatgatgatgatgatcataatattgatttcccatagggccaatgtaaggatcaaatgaagcaatgtcatgtaaaacattactgtgtttcaagcacctggcatgtattagatattcaatatttatttgttaaatgaatgaatggatgaagtgctaagcacaatgcctgtatataaactatattttctctttcttgggcatggggctggattttaatgtacagcattgttaaagtaggactgtacagtattagatgaaaactgagaaataatattaacatataattaactggactatgtggtttatattttcgcacactaaaaattggccatgtagtttaagaagataacatatatgctatatattgaaaaaaattactaaactatatcagtaaataataataatattattattttattattatttttttttgacagggagtttcgctcttgtcgcccaggctggagtgcagtggtgcaatctcggctctctgcaacctctgtctcctgggttcaagtgattctcctgcctcagcctcctgagtagctgggattacagatgtgcaccaccacgcctaacttttgtatttttagtagagatggggtttcaccatgttggccaggctggtctcgaactcctggcctcaggtgatccacccaccttggcctctcaaagtgctgggattacaggcgtgagccaccgcaccctgccgtaaataatactattattaatgttattataattatttccaaaaaataaattcatagaagttgaatggctgggttgaagtatatggtcattttatattttaatacatattacagagattgctctaatgcataacaatgggctacctccagaaaggttgtgaaaatttataacctcattaaaatatatagccaagtacttgtttccttaaacactaactatccttacaaattatccacttttttttcacccttgacattcctctaagtgaaaaatattgttgaatgctgactcagaattatttggccattaatgagtttgagtagctttttacgtatgtcttgatcatttgcatttcatttatgaattccttattcatacaatgtgtccatatttatactctataattccttatttatttataaaaactcatttatgttaagaatattatgttgtataagttttcttcagttttttgatggcttatgaactttgtggtctagatattttaaagtaatcctttaatatttaagcaaaataaaacatgtatgcaagatagtgcataaatataaaaggtatagcttgatgagtttttaatatttatatacacctgtgtaactctcatttaaaaaaagtcgtagaatatttccagaatctcagagtcccctaatgaacatccactgtaaagataaaaacagaatagcatcaatgtagccctctataaccatagattaatgttgcctgttctcaaactatcatacaaataaaatcatgaagtaggtactcttttgtgttctttttgcttagcactatgccaatgagatttttccatagtgtatgcagttatatctttagctttagcaaataattctgtaaagttttccaaagtgggtgtcccaacaagcaacatttgaggatttcagttgttccacatccttatcaactgttagttttgccagatgttatcattctttgccattcttgtagccatgtagtgcatttcctgatcattagtgatactgagatcttttcatgtgcttatttgccaaatgaatatgcttttttgggaagccttttgccaagttttaattggacagtttgtatttttcttaataatttataggaggtcttccatattttgaatatgagttctttgacaaatacatgatagcaaatatggtcttctgggctaaggcttacagtcacattctcttgatggtatttgtcgataagcagatcttcttaattttaatgagtctaatttagtcattgttttatacttaatactttttgtgttctgtttagactatttttgcaaaccctgatatcacgaagatatcctcctacagtttattcaggaagctttattattttacttttcaaattttggtctatgttctatctggaatagattttttgaggttatataaggtaggggtcaaaatttttgtcccacctgaatgtgtaattaacctagaaaaccttgcctcttgaaacaaatcaatgtttctaccattctgcagtggtaacgttgtcgtgaatcaggtctctgtatatgtgaagatgggtttctttctgaactttctattctgccccagtgatctgtctgtctgtctatacttgggccaaaatatttagttttaattactgtaacttcatacatgtcttcatatctagtagttctccaactttttttcttttaagattgccttggctattatatatgaattttagaaacagtttttcaattttcataaaaaattctgttgagatttaaattactcatttgtatttaggagaatgggcatctgaacaatatcaagtatccagcccataaatgtaatatattccttgatttctcccagcaatgtttttagttgtctgtatagaggtctcactcctatttgttagacttgttcaaacatattcattggttttccttcttaatagactatttttttagagcaattttagagtcacagaaaaattgagtggaaagtatagagagttccagtatactctctgctcctacacacgcacagccttccccattgtcaatatccctcaccagagcggtatatggtatatttgttacaattgatgaacctacattgacacatcattatcacccacagtccatagtttacattaaagttcactcttggtgttgtacaacgacaagtatccactactccagtatcctacagagtagcttcactccctaaaaatcttctatgttcctcatattcatccttatctctatcctaacccctagcaatcactgatcttttcactgtctctgtattttcaccttttctagaatatcatatagttgggataaaaaaatcatgtatcctcagattggcttgtttcactgagtaatatgcatgtaagatttctccatgtctttcatggcttggtggttcatatcttcttagtactaaataatattccatggttagatatagcatagttgatttattcattcacctactgaaggacatcttggttgcttccaagttttggcaattatgagtaaagttgctataaacatcagtgtgtaggtttttgtgtgaacataagttttcaacttataaataccaaagagcgcaattactggatcgtatggtaagatatgtttagttttgtaagaaactgtaaaattgtcttccaaaatgactatatcgttttacattcctatcagcaatgaaagagagtccctgttgccccacatcctcaccagcatttggtattgtcagtgttctggctttttggcctgttggttttcatgcaattatacttagtattgtttttgaacttcatttgctaattttgttactattgcattaaaatctaatcagtttttatatttacctatgtttagtgaccttgccaaactcattattatgataggtacacaatcctatcatttgcacatatcaggaactcaactctttttgaatgtttgtaataaatgtatataatggacatgccataaatatctcctgtagatatttttgtctgatgcacttattaattctgaaataatataaaatgttattttgtttttctgtatgacctgagttattagaccaatgtctagttttaaaaaagaaggtatatatttttgatattcaaaacactgtggttaaattgccaagctctggtttaaatataacccaggtgtgcttctttgatcaaaatattaactctctttaagtctggtttctaatctattaaatggtggtttaatatataattcataggaatcttataagaattatgtgagatgatgtatgtttagaatataagttgcttgttgtatagtaaatgtgcattaagtggtaactatttttaaactctttgaacatcaattttcttattgtgaaacaataagatagggataacactatatttccatatgattgttgtaccaatcaaaagagaaaatatgaagaccgtattactttagtttgtgtatgctcttagatcaagctaaactcatgtgaagaagcaatattttaaggaacttatatatttaggaacttggtttgagtaattagtataatgcataatcttataaaatactctgcgtgaagaatttttaaataacacattaaatcttgtgagccttatttcaatatttaatccccattagtacttctaaaagtgttttattgcaccaaatgttgctcaaagtatttgatagcgccataaattagtcccctatgcactgcagggttaaaatggcttgcttctattctacttcagtatactaaatgttggattaatgcttcaaaagaacagtgtgaactgaagatgatatttttaaactgtgtagaaataaatttcactcctgattagaaaacatgtaacaggaaaccggtttatttcaaatattatttagttttcattacaactttctcctttatgttcttgacatctgagagctacagaaggaaaaggatattttaaataatttttatctttattctatcaatttatatgtacagtcgtacctactgtatcttttctctaattagagatggcgtatagactggctcattacttctgcctaatgagccaggctccatgccacctctctaatcagaaaagagataggtacagaatgttcctatggacttattataaatcattttctttctcttacttgctcctttttttaatcaaaaaattaagtcactgtcctccatacttttgtccatatccaagatggtttctttcaaaagaggtaattgtgcaagcgattactgagctgaattaaaggtgctctcatgcagtgccaggccggctgtctctgctttggaacagacactgcctcaaacacaagcacatcaaatgaaggcctatagcagatcaagatggatcttttctgtctttctctgattaggtttgacttggttctctgtttctgcacccagaaagtaacaaccttccatatgagtgttggctactacagagctttttctttgagtcttatctctagcataactctctagaaaaatgtgttgccagtgacactttctgttactgcaggacttgtctttgctttccctggaaaagtaatcaatggaccaaatgcatgctttttactgaaccctcatttatccttattaatggtataatctgatttgatcaggctgaattttatgtatacaaatagaaacaccttagaccatctatatcaaccaaagtgtgatggctcctttttagaacattttcttttagttgtagatttattttagtgcttccaattgggtatataacctggagcacttgtgttagcagatatgtagttatgaggagtcagcaatgtcatcgtggtaataaaccatactagctctccaaattttggatttaaaattacagaactacatgaatcaaaacttttcccagttatttctgaacttgtttatcaacagagttctagttgccgattaaaggtgagaatttctacattatacattcaaatgtgcatagcactttcttaagaagatcattggtcattaaggaatcaataaatatttgttgagtgtctgttaaagtgaatatgcagggaagaaaaggatcatcgtctaaagctaactcctacttgccttcctttctgtgttttcaacgttgtgtgtcttagcccatatgcttgtacttgattctaaagttggaatgctacttctaatttctaccagtttcccatgggttcacatttctaacctctgctagatacacaaactccattttagttcagctgaaatcatgctaatttttttcagagagaattatttttgggaattagatttaaaaaaagcttagaaagtattgaaattgactaagagattggaatggaagaagagtataggaatatagtatatagataggagtttacttagtttcagaacattgcagacaaggtatctagcaatattatcagacaagttatgttgtatatttaaaatgatgttaatgtagctctctcaaccatactaagtaaaaactgctgattaattaaaatttgaatgcaaaatatgcaatcataaggtagtagaggaaaatgaaggcaagtgtttctataattctagcatattaaggacctttattagcacgataccatgtccagaaacactaaaggaaaatattgaaacatctgactattaaactgggaatttaaaattcaaacaacgattatcattttgtacttgatagtttggcaaggactagaaaagcgattataccggtgttggaaatagtttggggtaacctggcaaactatcaaaagtaaaaatgcgaaaactacttaatccaagatttctacttccaggacactatctcgagaatataattagacaaagacttaaatacatactcaaaatgttcattgtagaatgatttaaagtaacaaataactggaatcagttaaaaacttcaaaaaggaattgatttaataaattataattcatgcctactgtggaatagtatacaccatcaagaggaatgaaatatgtctctttctatgtacatggcaatgggttcatgatgtgttattacatgaaacaaacaagattgtatagtacaaaattctataaatttaatgtatatgttataaacatacatatacatattaaagttctggaaggaaatatgccaaaatgttcttcagaatgttagtaatgttaatctctatgagtgggattgcaaataattgctttttaaatttctttttgtgcaatttttttcagtaaactataattttataataagaattaaaaatattttccaattttggacaaaataataaatggaagcattttcagaatagatttattctatgaatgtaacaagttcagccagagacacctaatttgtatagtacagagggtggtcttgaaaatgttagtcatttaaattctgtacttgtcacatggattcaggaaacacaagcgttcattggacatttaactcattgtacatacaattattattactataataatttgtgcctgagaagcaaagcatgagatttagaatcagacagatttgggtttgaatgctagttctgcttcttaacagccaagtgactttggcaaagaatataacttctcaatccaatttcctaatatgttttctcatttataaaatgtgttttatacacatacttttcagggtgatcagagagcttataaataacacatgtttgattcatgttaggtattcaataaaatttcgctatcataaatattattgttaatttagttattaagtttattgactgtgatacttaaaattttaacataatggccatgaccatatttaattttttttggctgaaaatcaaaatttacttagggtgagggagaaaaaaagtccagtttagattcattatgtagcagatattttaaaattctgtgttttgtctatgtaaaccccacaaaataatttctctctctttttaaagatctgtcctttctagtgttcttcaatgtttcctgttcatcctcacttccacctgatgctatttcttcttaatccgaagaacctcccttttcattgcttgtagctcagcctgctgaagcaaattctctcagcttgtgtaaaaatgtctttacttttgcaggatattttcatttgatatagaattctacattgattactgttacttcttttagaactttaaagatgttgtttccttgtcttcttgccttcattgtttctggtgagatatcagccactatttatataaatgttttcttgtatactatatgtttctttccttctttctttctttctttctttctttctttctttctttctttctttctttctttctttctttctttctttttgaagcagagtctttcactctgtcaacccaggctggagtgcagtggtgcgatcttggctcactgcaacatctgcctcctgggttcaagtaattctcatgcctcagcctcccgagtagctgagattacaggtgtatgccaccatgccaatttttgtattttcagtagagaccgtgtttcaccatgttggccaggctggtctcgaactcctgacctcagatgatccaccctcctcagcctcccaaagtgctgggattacaagtgtgagccaccatgcctggcctatatattgttttccacttgatgctgttaagattttatttttatctttcatgttatcagtttatgatatgcctaggaatgattttcattatatttgtcctgcttgaggtttgcttaaattcttggatatgtacgttggtgttttcattacatttggaagttctgatagttgtatcttcaaacttttctttctttttttcctttttttgcttccttttctttcttctgtaataagactctagttagattgatgttagagcactagatattgtcccatagatattgggtacagttttgtttgttcctttgttttcattttccccactcttttttgtgtttcagtttggatactttctatttgacttgtctttatttcactggtcaatttctcttttgtgtctaggctgctgctaagcccatctagcaaactgttgatttctaaattatacttttcatttcaagtattttcatttggccgttttgtagacttcatctattggctcaaattcacccatctatttgcatgtattattcactatcacccctagatcttttagcatttatattataggtattttcaaatccctatttgataattccaacatctgggccatgtctgcatctccttctattgactctttcctctctttacaaagggccacattgtgttgatttctcatgtgtcttaaatatttttattgtatgataaacactttgcgtaaaagaatgaaagaggtggaagtaaatcatattttttggcgtttttccctttacaaagaagagcactgctggttctatgagaccttttgaatgggggtgggcagtaggaaagaaaaaataccaaactgacttgaagttgatctgtacgtgggctttactacagttttaatattatttagctcactactggtttcagatatctgtggatagaattgaaaatagttagacacatgtctggtggggcctccttagaattctaatatgtcattctggcctctgtatggctgcttctttcttactccttctatgcctgaatcctctatttcttacctctgagctaagtatgggagtagccctgggtctcgtccaatgagttacatgtccagtaaatgtttgtgtttcctacaaaaggcttattactttctagaatttaattcatttagttttttctgtgcgctctacattttgattggttaaaaaataatgactttagggcttatctggcttgttttggttgttagattgacagcaaagtgatggtcccttacaactttttacatttaaagcagatgttgaactattataacaacatctaatttatacccctttttttctttggcacaactctgtctatacttaactctccaaccctctagattgtttcagctatggctggtcactgactctgaacaaaaaaggtgcatattacttggccccaaagattattttggtagaattcaggcatcgacgttttaattacctcctctaatttttcatggggattttcagcttttgtgggccctaatttatccctgactcttaacttttatatctgtttctttggtttgcctgaaatctgtttactgctaatatttaaaactgaaacatgtttttttataaatctagccattggatcttgtttcactaatgatcatgtggcatcgtttaatctcggtgcccccagcggctctgtttgttcagtttgtatagcacatgcatctcttgtgtttctttttctgtcagatacataatcatattgattagtgtataccccttataccctgagtccaaaaattcctcatccctcccgggatcttcaaatgatttaacgactttccactatctctcactttttgatgtggtctgttccctccttactcaacttaagtttcatggccagttattataaccacttcttttcatggaactggacttccctgccgttttttcttcacttctactatgatcttggcactaccacagcataggttaaatatacccaaagaggacgactcttcccaccttaaactcatgaccatgaacttcctatgtttcctgatgctgccctgtgatcattccatatttccctcattcattcactttcctgtcttatgccaactatttatacattttcctttctcattatcctgatcctcagtgattatattacctccaactttaccataaaaattaacaaaaagaataaaagagcttctatagatttccactgctatatttatccaccactggcataccacctattaatagatctgaccaagaatatcttgcctcatttttccccaatttactgctgtattgtaaaattttcttgtattaatggaacattttcaagggaataaaggcatgttgttatttttccatgaaaaattattcttgaccctcccccatttcttctactagccattgtcttatttatttgctctccttttagcaaaacttcaccaaagtatattcaaccataggagcctttaattcctcttttcaaattccaccatctacagtcagactttagctcaccactgcacttaagctacacttgtcaaatctctactcaccttcacattataaatctaatagttaatttcaagtctttatctttttgacctattaacatcatttaatggagttgatcgctccttcctccttggtatacgttcttcacttggcatctaacactccatcatctctctgagtttctagttgctgcgtctcagtttgatttactggttcctcttcatctacttgacctcttagtattggtaccccaagccttaagacttagctctgctcccgtgtctacagacactcactcccttaaagatcacctccagtcttatagctttaaatgtcatctaagtgacttgacctccaaatataaatctccccaccccagcctctttcctgaactccagacgactctgttacatgtatcaaactacccaaagtctccatttgaatgtttaatttacatttcaaaattaaacttactttttttcaaaatggaactggttttcttaagctctctcactttgatccatatactacttcttccatggtcttcctcatcacaagtgaaggcaatttcatttttccactaagacagagaaaaagatttggagtcatccttgtcaattctctttatctcatgttcaacatttttttttttgttttgcaaaatcttgttggtgttagaatcaaaatatatccagattttgaatccttcttagcacttccactagaatcatcccagtccaattcatggttgctgctttgccgggattactgcattgtcttttaactacttccaggcactccgctttattctcaacacagcagccataattgttctgttaaatatcagtcaagcatattacttctctgctcaaaatgctctattgtttctccattttaccagagtgaaaaccaccattcttactataacctacaagacctaactgagctaacagcagttacttctctggctttatttcttacatttgtttattttgttctccttgttttacacaaattggcctctttgccgatttttgactatgggaggtgcacttctgccttgataccattcgctgttctttcaacctggaacttttcacctcctgatatccatcaggctgactcccttacctgattaggtctgctcaataccagtttcttaaatacatctttcttatcaccccgtttacatctgcaaacaccacctccccactttgggtctcattatgttgctctattcttttccatagcacttagcatctttaatgtattatagaattgacttatttttgttgaatatatctgtttttccctctataatataaaagagaaagcaagattttttttatttgcattactcactgatataccccaggatccagaagattgcctatcacatggtagctactcaatacatattttccaagtaaatgaatcgatgggcagcttccatgcagcattaagcctgtgggtgtgtggaatgcaagaattgaagcttgggagcctctgcctagatttcagaggatgtacagaaaagcctgggtgtccaggcagtggcctgctgcaggggcataaccctcatggccctagaacctctattagggcagcgaaaaggggaaatgtggtgttgcagtctccactgagtcccctctaggacattgccttgtggaactgtgagaagagggccaccatactccagaacccagaatggtagccactggcagctttcaccctcagcaaggaaaaactgcaggcactcagtgccagcatatgagagcagccactggagctaagccctgcaaagtcagaggggtagagcttcccaaggccttgggagctcactcctcccaccaatgtgccctggatatgagacgtggagtcaaaggagattattttggagcactaaaatttgatgactgcccttttgggtttcagacttgcatgggggctgtagcctcttttgtttggctgatttatcccgtttggaatggaaatatttactcaatgcttgtatctgaattatactttggaggtaaataactgggttttgattttacaggctcataggtagaagggaattgccttgtctcagatgagactttggactttggagttaatgctggaatgagttaagactttgggagactgttgggaagggataattgtattttgcaacatgaaaatgacatgaaatttgggaggggccagaggcagaatgacatggtttggatctgtgtccccatgcatgttcagttgtaatccccagggtggaggtgatacctggtgggagatgattggattctggaggtggatttttcatgaatgatttattgtgatagtgaatgagttatcacaagatctggttattttaaagtgtgtggcacctcctcccactttgctcctgctttccacatgtgatgtacctgcttctccttcaccttctgccattattgtgggcttcctgaggcctctccagaagccaaacagatattagcactatccttcctgtaaagcatgcagaactatgagtcaactaaccctcttttctttctaaattacccagcctcaggtatttctttatagcaaagcaagaatagactaatacattatcctttgttactgatgtctaaaaatcttttttaaaaaaattaaaagcaagtatattaagacagtaaaggaataaaaaatggctactccataggcagagcagccccaaggactgctggttgcccatttttatggttttttcttgattatatgctgaataaggggtgggttgtttgttagttttccctgaaaggggtgggcaattcccagaattgaggatccctccctgttttaggccatatacggtaacttcctgatgttgacatggcatttgtaaactgtcatggtactgatgggagagtatcagtgaggacaaccagaggtcactcttattgccgtattggttttcgtgggttttagctggcttctttactgcaatctgttttatcagcaaggtctttatgacctgtgtcttgagccaacctcctatctcatcctgtgacttaggatgacttaccctcttgagaatgcagcccagtaggcctcagccttattttacggagcccctattcaagatggagttgctctggttcaaaagcccctgacaattaccccctcctttttaaaagaaagctcttaatcttaagagttgtagagggatgaagatccatcttctctaacttcttcaagctgaataggggtgatgatattcctgcctaacaattagggtctcttgtctttgggatagagaggaactcaatcagaaaatgctggtatgtcaaggtccattcagaatacttgagttctgacaaaagttgatacctggaagattaataagtatttaatttaagaaaacattcggtaagcttatcctacacaaagagtataacagcaatacattccgcagcagtaaagcaaaataaataaaattatcacaactaaactaaattagaagactttccatgaactgggcaattgttagaaccaagctaatatgtggttgctagtaaatcccagtatgtgcccagaattagaatattgatccagattttgacattgcccattcattttggttttttttgaatagtagtcagagatcacttggtggtacacagaaataagcagagtctgtctaaattacagaaaaaaaaccttaaacacaactaatgagactagaatctaataacaggtgtaccatagtttttgaagcaattctttttcttttcagtctctcatttttactaaagacaaattataatagaatcgatttgtgcgcaaaaatgagctttagtcttatacttggcctgattacttgtataaaatgctaaaaaataactatttttcacataggattttaaaattggctttgatggaactttgttccataaaaaggaatctcagataagacctttttaaagctgagcccagccctgggtttgtacaatcaaatacctatgagttgggttaattcctttactcttgaggtcctaagatatcttcgggcccctgagtctatcagaaagtgacattctttacttatcacaggtcaggaaccctgtacagggcatgtgtaaacaaagaatgtgaccagttttcccaaggggtttttattggctttataagtcaagattgattccttaaaggaaagcacaccattccagtgaaagtcttggtaaaataacaaatttttccaattgtgtcctgttacaaaataaaacagatgcttattgcacttatgcaaatatctattgtcataagttaagaatactcacaaatagtttctaaattctgaagaaattaggtagaatcaaatatgccccaaattttgtttacaggagtaaaatttactcaattgttaaaaagctgtaaatagcttaaaagaaaagttgccttggctctgatagcaaaacaaaggatcagcaacattttaagcaaaaagttttaaaagattacttcagctatctattattcagcccatgcagttaactcttgttcagcttgatattcatgaacatttcagctctccatcagtactgaaagttttatcctctcttctaatgtcacaatcttcaaagttattagaaacgtgcattcaagagcacctgtcaaaatcctatagctgactctaaacttactttttaaagaggattaaaacaggtcaacaattttctatggatgacaaaaagttttagaacgacatatattaaagccacaattgataaagaaattttggttagttctgtgacatacaatgattttactgacaattataactattactgataatgtacactaagtcatatcagaattacaggactttcccataattttggaacacaaaccaataacatatttttacaaatacagtccaaagaaagcaaagaccatttcatatttttctatgcttcctgtatgatatttataccaaataacctgaatatgccattttggactttaggccacctaatagctaagagattaattaggtcagaagaagacatactttgtaattttattttggaaagcttgtcaaatattaaaggtttaaaacactggatatcacaaaatataattccaggtcatcataagtcattcattaggccaaaataataactcaaaaatatttaaaggggaaaaacctttactcattaatagagggaagacttagatctccaaaccatctgtctcttttctttcctttcctatataaaatttcttttttagaaacaacctctttgcatagttgggaatatggctaattccacatgtccccaggccttatctagaatctaaagtctccaaagtaggtaaattgaacaattttcaaaagtcaaagaagcagtttctgaccttaaagcatttagtaaacttaatatgtgacctgcctaatttagaccaaatgtctttattttatcaataatttttaaagctgtttttatttcccaaacattcctaaagtcacatgaactaaaagtgattacactttttacttttctgacaaaatatttgatttagacacttattatttttaaaccgattaatcaaagctcttttatatcacatatgcagcacatataaatacacagacagaaaaagatccagtaagatttttcatttttcggtttcttaactggattactggcttcagggtggagccttagaggaacagagccaagaatgcgtgaaatttctaaagcctaataagcaggcacagctggaaggcaaactagatcttcaggaattaagggttccattttaatagcagattctggatcccaaaaagagggaattagcccatctcccatgggagtcttacctctcagtggggagtgggggcatttccataacttctaagtgaccaagagcatgcttctctgatccaaatgtgcaaagagccaagtattccataactgccattagccattctcaaaagtgtatttcctacctagttattgcataccaaagctctttcctaatgtaaagtgatttctgatacccccaaaagtaaaaaacatcagataacgcaatgcgaaacacaagacagccttagattttgagagggatctatccatttccaattcctgggatttcatgaggaaaacagatgttttttctcaaaatggggtctgtggtgctcctttttttcccaaggagtcccaggctgttagaacttaaatatctgcttttaattaagctgacttttaatggtactgctgtttttaaaaagtcctcttaaatttcttattacctgactttagccaggcgaaactgtcaataattctggcttttgaactttatcaaaggtaacctcccaggtgttcagagaaaggaaaattcaagacagaccattgaggggaagagaatcaacaaatgttcatgcgcatatcaaaccagaaaggactcattccctaagctgggaattgaaccctgaacctgggtcaccattgtgaaaagaaagcctcagctactgagctactcactgggcagtttccattgctcttcccagaaggagtctagagcagcagattttgagcttgcaaaggttttaaatgctcaagataattttgtagagctaactatgacatgaacccccaaattcctgttttctggatggtagagacctagagaaagtaccgccatgtggtcacaaggtcaagctcccaaggacataactagccagtttgctgggccgtcttgaacagtaggcttatggggtcctaagcttgtgttctatcctaaggtacccctctttctaacagaaatatacaggaagacaaattcacagtgcaaagtacaacagattcactgtagcttaaaactagcctcacaaatcctttttcacattaatcagaactttacagaggagataaacagtgatttttaccattctttgaactagtttgcacagagagaaagagagaggacagaagtctcactggtaagaaattcttacccttttgctggcatgccaggcttctgggttccctttccctgagcagtcctagtgacccagcttgacgcatcatagccctgggggccaagctgcaacacaaaggaaaattgtctttttttctgtcctggccagagcaaaatatgtgtgacatagacattagccactctgctcagcatccaatatcaaactaacaaggctcaaatttgcccctggttggaccctgtcatcattaatccaacctctgaccagaagtttcaacatgtggtctctgggcaagatggtcaccctgagtaagagaaaaggtaagaaagggaaaggagagaaagaaagaaaagcattggctgcatacagcagggtggggaaggcaaaataatcaaggataccagagaaagaccctcccattgcgcaaaagttcaggctgccgcttgaagggatctgtcatgaagggatcttttccagtagtcccattagctctcaaacatcccccttttgggaggaaaaagctccccaagtcccacattcacatgcatgcctaattatgtcacccacagccatcagcaaagagggcaaggcagattaacccaacgagaatagcagttaatatctcgtattgccaaacccattattagctgagagggactttactgagaggggcctgaaaccccctaaatcttaggaaggactctaaccttcttaagttgggccttgaatccatgttctgtcaagtgtccttgtcttttattaagaggggcctttaaccacctctgtcttaagagagactctaacgcccctaaattaggcctctaacccatttccatcctttacccaagcaaatgtaccccacttacccagagtcagccaataagtgctgaagtctatttcctttgggtcaggggagtctcctccgtgttgtcccttccatggttcaccagaaagatgttaccagaaagaggtccagatccagaccccaagagatacattaaaacaaagcaagttttccttttgaacttgtcaaaaattccatcttgtaaaggatattaaatgttgctttaagctgaaccttgagcaaattaggtggtttgtgtgaccatacatgtatgtggtggcttcttgtttgcaacttcaaggaacaagtattaatagttcagtgtatgatgttgatttgagttgagcatttgcagtttggataatcttaaattttgacagacactagctgtggagactctttctgttactaaatccttttgttttgaagctattgccattcgtctttctcttgtcctttatattttttgtctgtttctttaagcttttattggaaatgtgcataagtaaagaattacttgtgttacttgccaagcaatgcacatttcatagttttaaatctgtaatcagcaataaaaatcctaaaatatgtatctaagaacatcttaaaaaattctttctcactcaagaaagaattcaaggtgagtccatagagtaaagtgaaaccaagtttattaagaaagtaaaggaataaagaatggctactccgtgtagagcagcacccccaatgtctaaaaatcttaacaatgataataaaagcagaaaacatatggtaattttttggcataaaacccttactgcagtgagcattaaaaacaaataaactgctttggttcttcattctagagacatcatatttaaaaacttagatttcattatttgattttcattttgttacaaaataaaatattcttagtgtcacactaaacagagatcagataattaacctgaccccatgatgcataattttaattttaatttcaatttgagttcttaatagaaataatgaaaggctgttatcatattttggttgaatggacacagatctatttttttatggtaccacattgagaatttgtttttttacatatataaatctattaatggtattgtcaaaatactgtcttttttttttttttttaagatgtagtattgctttgtcgcccaggctggagtgcagtggcatgatcgtatcctagtgcagtctcaagtaatcctcctgtcatagcctactgcatagctgggagtacaggtgcacaccaccatgcctggctaatttttttttttttttttttgtagagatggttcttactatgttgtccagtccagtttgaagcaatcctcctacctcagccacccaaagcataggcatgaaccatcaagcccagctagtcttttaagctttgttgttttgaaaataatgaggattattactttgatatcatattagaattttttctaaaaatttaacaagaaattatctttagttctgtataatctgtgggcagctatatctatttataagcatctatgccaattattactttacttctagttgtaatttaaatttgttttagttttcaaggacacagctagtcttaataacttgatttgtttttatttccatttattgagtttagcatttataataacttaaaaaaaattttatttcactttaagttctgggatacttgtgcataacgtgaaagtttgttacataggtatatgcgtgccatggtgatttgctgcacctatcaacctgtcatctaggttttaagccccacatgccttaactgtttgtcctgatgctctctctcccctccccacacctgaaaggccctggtgtgtattgttcccctcccttcgtccatgtgttctcattgttcagctcccatttatgagtgagaacatgtggtgtttggttttctgtttctgtgttagtttgctaaggatgatggcttccagcttcatcagagtttctgcaaaagacatgatcttattcctttttatggctgcatagttttccttggtgtatatataccacattctctttatccagtctatcattgatgagaatttgggttggttccatgtctttgctattgtaaatagtgctgcagtaaacatatgtgtgcatgtgtctttctagtagaataatttatattcctttgggtatatgcccattaatgggattgctgggtcaaatagtatttctggttctgggtctttggggaatcaccacactgttttccataatggttcaactaatttacattcccaccaacagtgtaaaagtgttcctgtttctccacagtctcactagcgtgttgtttcttgactttttaataattgccactctgactgaaatgagatagtatctcatggttttgatttgcatttctctaatgatcagtgatgttaagctttttaaaaatgtttgttgactgcattaatgtcttcttttgagaagtgtctgttcatatcctttgcccactttttgatggggttgttttcttcttgtacatttgtttaagttccttgcagattctggatattagacctttgtcaggtggatgggttgcgaaaattttctcccattctgtaggttgcctactcaccctgatgatagtttcttctgttgtacaaaagctctttagtttaattagatcccatttggcaatttttgcttttgttgcaattgcttttggcatttttgacatgaaatctttgcctatgcctatgtcctgaatggtatcgcctaggttttcttctagggttttaatgattttgggttttgcaattaagtctttaatccatcttgagtcaatttttgtgtaaggtgtaaggaaaggttccagtttcagtattctgcataaggctagccagttttcccagcaccatttataaaatagggaatcttttccccattgcttgtttttgtacagcttgtcaaagatcagatggttgtagaagtgtggtgttatttctgaggtctctgacctgttccattggtctatatgtctgttttggtaccagtaccatgctgttttggttactgtagacttgtagtatagtttgaagacaggtagcatgatgcctccagctacgttctttttgcttaggattgtcttggctatatggactctttgttatttccatatgaaatttaaattagttttttctaattctgtgaagaaagtcaatggtagtttgatgggaataggactgaatctataaattactttgcgtggtgtggccattttcatgttattgattcttcctatccatgacgatggaatgtttttccatttgtttatttcttctcttatttccttgagcagtggtttgtagttctccttgaggagctccttcacgtcccttgttagctgtattcctaggtattttactctctttgtagcaattgtgaatgggagttcattcatgatttggttctctgcttgtctatttttggtgtatagaaatgcttgtgatctttgcacattgattttgtatcctgagactttgctgaagtcgtttatcagcttaaggaattttggggctgaaacaatggcgttttctaaatatagaatcatgtcgcctgcaaacagagacaatttgacttcctctcttcctgtttgaataccctttatttctttctcttgcctgattgccctggccagaacttccaatactatcttgaataggaatgatgaaagaagggatccttgtcttgtgccagttttcaaagggaatgcttccagcttttgcccattcagtataatattggctgtgggtttgtcataaatagctcttattattttgagatatgttccatcaatacctagtttattgagagttttaacaagaaggggtgttgaattttattgaagcccttttctacatctatcgagatgatcacgtgattttgtcattggttctgtttatgtgatagattacgtttattgattgtgtatgttgaaccacccttgcatcccagggatgaagccagcttggtcgtggtggataaggatatgctgctggatttggtttgtcagtattttattgaggattttcgtattagtgttcatcagggatgttggcctgaagttttccttcttttttttttttttgtcatgtctctgccaggttttttgtatcaggatgatgctggcctcataaaatgagttagggaggaattcctcgttttcaattttttggaatagtttcaaaaggaatggtaccagctcctctttgtacctctggtagaattcagctgtgaatctgtctagtcctgtgctttttttggttggtaggctattaattactgcctcaatttcagaactcattattcgtctattcagggattcgacttttcctggtttagccttgggaaggtttatgtgtccaggaatttatccatttcttctagattttctagtttatttgtgtagaggtatctatactattctctgatggtagtttgtatttctgtggggtcagtggtgttatcccctttgtcattttttatgtgtctatttgattcttctctcttttcttctttattagtctagctagcagtctattttgtttgtttgtttgtttgttttcaaaaaaaacagctcctggattcattgattttttgaagggtttttcgtgtctctctctccttcagttctgctctgatcttagttgtttcttgtcttttcctagatttttttatttgtttgctcttgcttctctagttcttttaattgtgacactagagtgtcaattcgagatctttctagctttctgatatgggtatttagtgctataaatttccctcttaacactgccttagctgtgttccagagattctggtatgttgtttctttgctctcattagtttcaaagaacttcttgatgtctgctttaatttcattatttacccaggagtcgttcaggagtaggttgttcaatttccatgtagttgtgtggttttgagtgagttttttaatcttaactctaatttgattgcattgtggtctgagaaactgttataatttcagttcttttgcatttgctgaggagtgtttactaataactttttaaaatatcagtgatttttccaggtaatagacatttatggctttgaaatttcaaagtatgtttaaacaaaaaaattcatcaacaacctcctcccacattctgcatttacatttatcattatcatgtgtgttcttatacttttattattagattgaaaaatatacaattgccattcttatagattaaaaatggtcaaacattggctatttcaaatagttcaatatgtaagtatctcaaaataatataacacatgctgttatctttatgttgttagtatttatgtaagtgctcatatatatatatgcacatatataaaaatacagagtatatcttcaatttgcctttttcataaataatttttctgagaattacccattttgatattttgttcattcattttagtttctctattagtattccactttataaaaaaaagtatggattatgtatttgtttccatgtggagagttagcttttctctttatataatttatagaagattgcaattaatattttgtatgtctccttgtgtgcatttgtgagaatttgcacagaaaaagcacagtgaaaggtatcataggcttcttaagtattcttatcttccattttgatatatcgccaaactgttatctaaagtggttgaaccaatttgccttcctatggcaacaggtaaaatacccatttgcctgtgttatcaacatgttttgttttccaacatttttgccaaaatcatgagtataaaatactcccttattttcgttttaattttaatttctttagtaactattaaaatattgaaacatatggcatttgagttttcgcctctgtgaattgcttgttctggtatatctttcattaaattttccattgcatttccttgtcagtaaaagttacacttataatctgcattttacatgttttaattatattgattgtaaaaatatttccttcagtggtttgacttttaaaattttttgtatttttggtctgtcacacaagagttttaaattttaacattggcgaatatatcagttactttttatggttcagatagttttatatcttacttaagaaattctcttttatcatgatatatattgccttctattttttctgaaattaatttttgtataatgtgtgaggtagagatttaattttaacttatctttattggcacattcttgtcccactgatttttattgaacacacattatttcctcactgatttttaaagccacctctactgtatctcaagctccaatttgatggtagtgtgtttaacatcttgtttcagaggtcaatttgattaacttcttgccaaaagctatagcacttgattatcttttgatatcttgcagtggattccttcttaccagccttcttcagctattgttaggtcttactcctccaaatgaattttaggatcagtttatataaaaatgtttattgagattttttattggaattgaattaaatttatacaacagcttagggataatttatattgttatgctgatttttttcatccatgatcatagtatatcattctatttatttagatcttcttttatgtcttttagtaaatttctataaataaaatactcataacttataataaaagggataaatataaaatttattcctaggtatctcaaggttttggtgctattgtaaatagtatcttttattaaattgcattttatatttattgctgatataaagaaatattataaattgttatatatcattcttatttccaacaccattttggaacacattaattcgaatatttgactatagatttatttgaattgttgaggtagaaaaccatgtaatttgcaaataatatatttatgtcattctaattcttatggattttacttcttttctttgtctgattgtgaggtctagacattcctttaacaatcttggaaaaaaaagcagtgagagcaagcatcctcaacttgtcattgctttaatggaaatggctttacattttttcctttaaataagatgtttgccatatcacgttaaaaactttcccacctattcctaattgtttagggttttctacttgtatattatgtatttttcaagacatggcagatttaatttgttgagatataattttcatgcctatgctaccaagtgagattggtcctgtcgttttcctttctcttaatgtccttgagaacatgtttcagctctcccatttatgacctgttttaccttgggcaaatttcttaatatctatatgcttcagtttcctcatctttaaaattagcatcaaaagaatatctttccatagtgtttttatgaggattaaataaaataatatacataaagcacacagaacagggcctgctactcagtatgcaatagttattagctgtcattgtcatcattaatattaagatattttaaaacacttttcccctaaaatacttagagtactttgatgcatatcctaagatctgtctctggctgctatttctggacatttctttgttgtaatatttctggtagctcttacttgtgactgtgaattgtagacatttgatgcccacagactattcagctctttcaacttctaccttgttcctaaggaaatctgaatcaattcatcagggtctttcctaaagaaatttgtcgaagttatccaatccaatgccacgattatatttcttcttgtatgattgtgtttttgttgtttgtcaaagaaatttttgcccaagtcaaggtcacaaagaattttcctgtaattttttctagctatattatagttttaggttagttctattatccatattgagttaaacttttacataaggtgcatgatatgttttcaggtgctttaaaaaacataagatatccaatattccaggaccgttcttggaaagaagagtattctttttccatttaattttctttgccacttagttaaaatacagtggactgtgtatgattttattatcagcattttcattgctactgaaatgcagtaggtatgcaattgattttcatgtattgatattgcaacttgcaactttgctgaactcatttataattcctaatagattttagtagatttcttagagttttctatgtacaagagatagttttacttctactttttcaatatggaaagatttatttcttctgcttgcctatttgccctgtctggtaactacagaaaaatgttgactagaagtggcaaaagtggacattgttatcttgttcctgatcttagggaaaaagcattttttcaccactaaatatgatgttagctgttggtttttcacagataccctttattagatgaggaagttgtcttctttaatagttagttgctttttaaaaattttatcatgaagtgttaactttgactatgtagctattaagatgatcatgacgtttttgtcctttatttttccaagtttgtgtattacttgattacttttcgtacattgaaccagccttgcatccttgtgataattccacttgctcatgatgtatgatcctttttgttagtactgtatttggttcactagaattttgttgaagacttttgcatctgtattcataaggcatattggcctatagttttcttttgatgtctttgatgtttttggtattagggtaatactggtttcatagagtaatttggagagtgtttcttcctcttctattttttggaagggcttgtgaagtaatggtgctacttcttctttaaatgtttggtagaattcgccaatgaaagcatctggtcctaagcttttctttgtggaaatttttaaaaaattactaatttgatctcttttagtggtatagatctattcagattgctaatttcttcttaagtcagtttacatagtttgtgtgtttcttggaatttgtctattttatctaggttgtctaatttttggcatacagttgttcatagtatcccttatgatccttttttgtgactgcaaagtcagttgtaatttcccttttttaattcctgattttaatcattagagtcatctcttttcttggctagtctagttgaatgtttgtcaaatttgttaataatttctaacaatcaacttttgttgtttttcttgttgtttttctattctctattttatttgtctgctcaaatctttataatttcctttcttctgctagctttaggttgagtttgtttttctttttctagtttcttaaggtagaagattaggttattgatttaataaatttctctttaaatataagtgtttacagctctaaatatcactttaaacactacttaaatcccataaagtgtgatatgttgcatgttcacttccattaatctcaaaggatttttaaatctttttgtaatttcttctttgatcattagttattaggaatgggttaattttcacacatttgttaattttacaaatttgcttctgttattgatttctaattttttctattgtgatccaagaatatactttgcatgatctcagttattttaaatttatagagacttgttttatggcctaacatataatctatcctggagaatgtaccatatgcacttgagaagagtttgtattctgttgttgttgggtggagtgttctgttggtgtctattaagtctaattggtttataaagtcattcaggtcttccatttctgtttgtattctgtgtagttgctctctccatgattgaaagtaggatattgaagtctccactattgttgttaaatggtgaatttttctctttaaatctttaaatttgtcattttactgttgttagacacatacatgattataattgttttattttcctgatggattgatatcttaaaatattcttgtctctactaaaaattttgtctaaagtctattttgtctgatgttagcataggagctcaagctctcttttggttattgtttacgtggtgtatctttcttttcattcttgaacattcaatctatttgtttcctcgaatgtagagtttgtctcttgcagaactcctatagggggtcatgtttgtttgtttttccattttgtaaatatctactttttgattgaagtgcttaagccatttacatttagcacagtgactgataaggtagttacaatgtcactttgctgttggttttttaaaatatgatttatgtcttctaaatttctctattctttcactgtcttctttgggttaaaaagttatcttctagtgtataatttaatacccttgtcatttattctactatgtttgttgcccaggatgttatcattaacatcttaattcataaaaatctaattcaaattaataccaacttaattttaagagtatgcaaaattttgcacctatatagtttttgttcactctgctttcttttgtgccgttattgtctatggagattttttacattggatgcccatcaacacagatatataattattgctttataaagtcatcttttaaaacaaatgtgagagagaaaaagaattacagtaaaaatacatttataatctttttaaatatttacctatttaattacctttacaggtactctttatttcttcatctggattacattgctctctaatatcctatcatatcagccagaaggacttcttttggtatttcttgtagagcaagtctgatagtgataaaacctctcaatatttctttatctggaaatgtcaatttatcctgcatttttgaaggagagttttgctagaaaaaatagtttttggtgtacagtttttttttacgactttaaatatgtcattcttctcccttctggacgccatggtttcttcacaagaaatctgtggttaatcttattgaagatcccatgtaggagatggccttttctcacttgctgctttcaagattttctctttgtctttgtctttcaacagtttgatttttaatgtgcctagggtgtggatctatttgaatttatcccacttgcagttcattgagcttcttggatgcatagattaatagttttcatcaaattttggaagtttttggtaattatttctctaaatattctttcagtccttttacctcttctctgaaactcccattatgcctatgctggtactcttgatggcgtcccacagctttctggggctttgttaatttctcaacattctttctctttctattgctcacactgaataatctcaattgacctgtattcaagttcattaattatttcttctgatcatttagatctgctagtgagctcctctagtgaatttttcatttgaaagttttctattttctatttattttttctttttttgatgaaatgaggtctcactacgtttcccagggtggtctcaaactgctgggctcgtgatcctcccacctcagcctcccaaagtgctgggattacaggcatgagccaccatgcctggctaaaaattttctatttcttttctcatattctatattgtctaaagcatcattgtcatactttgctttagttctttggacactttgttttgttttgtttttagttatttgaacatatataaaatagttgatttaaagtctttgtctggtaagtttaatgtatgagcttacaattgacccatttccattgcccatttttcttcccctgtatattgtttgtaggagtttctttgcatatgccatattctttgttgaaaaccagacattttaaacacatagtgtagcaaatctggaaatcagattatttccctttccagagttgttttgttgctgctatttgtcactattactactgtttgcttgtttagtggctttcctgagctaattctgtgaagtctgtttctttgtcatatgtgataaatgaagtcattgtttgctcatcttagtagtcaggcaatgactgaacagagaatttcttaaatgcctagaaccaatacattttccagtctctggtgagagatctgtacgcatgttgcagaatgccatcaacactgaggcagtttaacactctcctttagtccccacttcctgcttgtgcagagcctcaaagtcgagctgaggtgagaccttaggactttctcaggtctttctttagcatgcgcatatacctgagcacatacttagccttttgcatgttcataatcttgtagattcgcaggcattttttaaggatttgcaaagcgtttatggacatgatgtttcacatcttctccttttaagtattttggattgtttgttgtttcttctgactgttgttactgcctgggtcaactgcaatgttaagcagttgccagtgattatttttagcaaataattgttttaaacaaacagagtaaatgctgtttccagtggatgaactctgagtcaattcaagccttactagtggggctttccatggtacttccaggcagatcgaataatgacaatcatctgaggatagagctttgaaacagctccactcccattctgatcctctagcagtaactaggctgctggttttcaccctgattgcaaactgttcattttcagggcttccagagagtggcagagaggagtacgggaataggaaagctaaaatgccatagaacatgttgttcttaccaatattcagtcatttaaaaaataaacactgtccacattgttgcaagtctttgctttatttccagagttctcaataagttgatgtgatattctttgccagtgttcccattgcttttatggaagacagactcttccattgttttcactctgccattgctgatgtccttttattcgtttcctcaatgtcttatagtttttacctatatacattgccttgctttaatagatttataactaatatttcacattttcagtgctaataaaatagtatttaaaagttttaatttccattggttaatcactagtatatagaaattaaattattactcatttaacttctatcaaacaaaattaactaattcacttgttatttctaatagcttttatgtacagtcatggaaattttctgagtagataattatgctatctgcaaatgagagtttatttctttccttctgattgttgtgacatttgttacttagccttattatctgtttttaccctgatttatatgttggattacttagttttcccatttgactaattttgttgtgccacccagttgtaatgcataacaacttctttccagtcatcacctgtctattttctgactagacagctatgaggtctttcttgtatgagtcatgtctatttccttgatcaatttatataatttagacatatctttgccatatgaatatttttcaaagaagaatttttatggaatgtttatcccaatgaatatctgttgttaaaaaattggcaagtagcaaaggaataagtaaaatttatttctatggctgtccttgaaatatttgatagtattctcacctcaaatcataattcttttatttgggatggatgattcacattaactctaggtctttagaaaacttgctgtaactcttttttatgaagaatttcttcaaatatgaattctttagcaatggatatgattgcaagctccaaaatttaaaactaaaatggtttttaaaggttataaaacccagcccctttattttatagataataaaatagatttcattatccccctgcagcagagcttccctttagctattattaaaatatagggagtgaattctaatttatcagcattgaaaggtacacctccacttctaataccctggtctgactgccaacatttttcacacatatgactgtaatatcctcctaactggcctcttggcttctactcttatcttcctatattctagtctcagaacttttgaataatcctgagatcacatcactcctcttctcaaaaccctccaatggcttcccattttactcagaccagaaatcaaatttcttacagtaggctattagactttgtatatataacaatttgtacctccatcctcccctctcccccagccagctacttgtctgacctaaccttctaataacctccccccttttattctgctccaggatgctagctccttgcacctcctctaacatgccaagcatactgatttagaggtctatgtgcttattaatgcctgcctggaacattttgcccctagatatacgtatgactcattcccattcccctgtcaatgccacattctcaatgaggcctctcttggacataacatccccactaaaatctagccatgctctccaacctgctctaatccttctgtttttcataaaatgtattgcattctaatatactatatgaatttctcattcattatgtttatctacgtgaatgcaagctccataaaagcaagggtattttgttgttgttgttaactgattgtacttttggcactcgtgaaagtgcctggcacataataggcttccaataaatacttgtgaatgaatcaatacgtaaaagaatgaagccaccctgacatttaaagccatggttcaggctttagcaacatcacagtgttcatcagttttgctgtctttcagttatggtaagtctttcaaaattatgaatggctagcccctgtttgttatgatctgggttctttgagataaaacacttccctagaggttatataaaatattttagacaatattttatcctgagaaagcaaattggataacatgaaatgcaggtaatttctttttttctccttgatatctcattatgttggcaaaaataggaaatgaagactgtcagttttccacggctgccatgcaaaagtactgcaaactgggtggcttctcccagaaagagaatgcctaggactatagcggggcacagaaagttccccacaaggagtatttcaaagctgagacattaggggctgtatgaggcagaaaaattggaagcagaggcaaaatgggaaccttagggctgagagagcctgaaggttgtggggcattaaaaattcatgctgtagattaacagtgtggggtgtaaaggatgctaggagaggaagaactgagcatggttagggatagttgaaggtaaagaaaaaacgggacacaggcccagcttccttgacaacattatctcttacctcataaataaaatttatgctatgaggagtgactttcctattcgtctttcctattccccaaataaaagcataggcacacaatggctttgctgtatttgcatgtattcttctcatctttcttctaagaatgacatgtccatctttctaccattccctctttgtttaactttagatcctggatccaggtcaattgatcataaatcatgttgcctggatggccaattaactgaaagaatattttaccatgttttcttatttcttgtaactaattataaattttagaacaatttgtgttggaaatcttctaaagatttctgcaaagttttagtagatttagttttgtcttcataacaccacttggaggaataattctttgcacttgtgccagctgcctgttttaggatagatagagtagagaaactctccctacgggaaagtcagagcaggaggctgcctagagcacatcttcttgtgggcctcagctcatggggtatgtggaagactgagactaatgggtagaaagagagagcctataagtgtatttttcttagactacatcagctgagaatacactaatgaagaaatatttttatatgtaatattttggttattttctcaaatatattatttaatataaatataacatgtaaatatatgaatatacacaaatatatgcatacacacactcacacacagacacatactctttttaggctcctaagtctcacactttgcttgtgagtttcttcctgattctgagatcactatctcagactacttcgtgtgctaattctcctctccatgttttatttatcagccatatcctcactctgtcccagtttcctccaagcaaccaccaaggagcagcagaaaacataaatcaaacattctttaaaactctatcaagacagagtgaaaactgaatagttaaaagaaaaaacacattgggaaaatggtcatttgatgattaaaattgctccaattttatttttttagaactattgaaataaacaattattgaaataaattttgttattaaaaatataacaaaaaacttggagtcggtagtttttctgctttattctgtctccactctcttgggcttatttgtctcagtaagttctgaaaaaatatttgccaaacaaataaaataataccatgtggattaaggttgatagctacatttgccttgaaaggtcacctaattcaaagtagattggtctttgaacctggttttcttagaagattttccctgaggcaataaaattctgagagtgaactatgatactattgatatatgtgaatgacacagaacctacaagtaggaagtcttcgatgagtcctcatttggagattttctagaacagacattaatttaactttagagagaacccaaacagatagcctggagcttggagctataacaggtgggatgtgagagtgaggaatcttccttttggcattgcaaatactctggaaattgcaatcagaagcagatgacaatcaaatttagggctgatgagataatatatctatggagttataaactagagagaaatttgacttgggaagggacttctggagaaagccatgagttcgatcagtaaataggctggccaaagtattcactttgacttaagtcctacagtgtccatggagataactatgattatttttgttattaatgtggaattagcaaactagagattgatctgtaaaagtttcaaagggcagtgacataaatatctttttaaccttaacatcttcaaaggaatatcacttaaatacttgtcaggtattgcttggtaaacagagacttcttatattatgcacatgtgtgtatttgcaggtttagagcagtttgtcggaagaatgcaagattttcgattataccaagtggcacttacaaacaggtaagcagatgttgcattgtaaacctcaagaaccgaaaggataaatgctgaattcacttaaataagaatactatgtagattataccattttttatctttataccatttggcaaacttcacctaattaatgtttacagtgtttgctttggcttagtctatggttgttattcactagtgctactcttgaggaactccttgtaatatgaaattgatcacatttttcctaaggatattctgtaagaaaacttgatatttgaacattttataaaacttgggatacaatgcttaaattttctatatgaggtagtttctattaacaatacttgagaaacttctacatctgccttttttaaattggtttgttgactttatacctactagagaatgtagaacaataaacgtgattaattattttgatacatgggaaattctcaagagactgatctattagacttggagacaagaagaatgagcatttgaagtattgtgatatatttttctattttcagtgaacaaataattatatagactcaggctagctttaatgacattatttccttatcttgagagtagatgggaaatctttcttagggcttcttaaaagcacacagaattttaaaaaatttaagtgaaattctgcttaggatgcctttgaactttcttcttcagcttatgatatcatggtataatagtatattgttgtatggatgagttgatcttatttacttctattaaaaatcaaaaagaagaatgttcattcatatttcttcaaggcagatataaattagtgtggtgggtttccaaatgagaagactagcccttgtaaatttagaagcattgcttttgatgtggttcttagtccatggcagatcattaacaatataaacattctttcttaccaggctatataatcaaggtatgcctcagtaaagggtgccatggccctggaacacagtgttaggtgtatttactgccaaaagccttactatattttagatcacctttgtctaaaatgctgaagggcaatgttgtagtaattctttgggaataaagtttttccttgggagtgaaagattttatactggattctatactggtagcttttggtcccattcaaaacttggtatcagttgaaaagaattgatgagatttaaagaaggtatgacttcatgtgatttaatgaatggaaaagctgcctgactccttcactgctccactggggtctgagaggaaaagcctggtttctctggtaagaccttgattactaattttggcctacctgaaatgtctgggaaggtgctatgtggaagaatgcctataaatagaatgactaattctggtctagaacaagtatattgcccctaatggaaaaattaaatatatctacctggaattggcattctttgactgttggcagccgccatatgatctgaagccaatgaagcattacaggatgtcaggatctgtactgatgagtcacaggaaaccattgacaaatggccttggcctcagtccttcacttaaaacagaagcagataaaatgatacttgctttcgtacttctttcccatggatgaactgaaaacattatctataactctcattgttctccatatattattgttcactctcagtagttagtttagcatcctaagtaaatgtgatcatttctatattatcacaaatagacacggtaaaatattgtggtatttaaataagtatcttaataatcagacaagggcttatgcatgcttcttgatataaataaaaagttaatattaaaatgtgtgggttttgatatacattttatgataatgaatttgtttatttggccaaaaataagttttattttatgtttcatgcatcaaattattaaaactaaatggatactcatgaaagcactaaacgagtgacattcatttgtaacgactcctagaagttctattactgttaagctctttgtccttacagtctccctcttgactcccacagagagattctggaagtcttctctggagatcttctcagattgcatgcccaatcacattgccgttgccctggcagccacccgcgggtccaccctttggcacagcggtactgcattcctaatgatgcaggagacacagctgataatagagtgtcacggttgaatcctgaagcccatcctctctcttttgtcaatgataatgatgttggtacttcatgggtttcaaatgtgtttacaaacattacacagcttaatcaaggagtgactatttcagttgatttggaaaatggacagtatcaggtaatgagaaacgataaggtgtacattaatttcctgtggttattgcaacaaatgcccacaaacttcatgtcttaaaacaacagaaatatattccctaacagttctggagatcagaaatatgaaatcaacatgttggcagggctacattcccttaaagattccagaggaggatccctccttgccatttgcagctcctggtggcccttggtgttacttggcttgtggcaccacaacttcaatctctgcctccattttcacatggtgtccttccttgtttctctgtgagcatcaattatcccttttctttctcttatataaggcccaccctattagacccaggatgatctcatattgacatccttaattatactgcaaagaccctatttacaaataaagtcacatttacaggtttggacagtagtacttggacatatctatttgggaacacaattcaacccactacaaggtgaaaactgaactaggcaattgaaccttgcctcaataaagtagtgtattataatgtatacaataaaaatatctaaaagacaacatgtaggaccttatgtttgagatttgtatcaaaatgatatttatgaaatgttgaaaataattatttttattaagtagcaaaaattaatacaaactaaggtgctttttctaaattaagaagtctctatatatgacatttatttcatagaagtaatgttctttgtttatgtctttatttgcatgttgatttataaaatccttgagcaaatgaacagatacacaattatagaatatgttgcttttaccacagggctatgaagtttctggatgtctaatacatatttgataactataattatgatgaagtgagccaatatatttgaatctaataattccatggtttgatatatactgatggttaaacttaaaactttaattacattaattaactttccattttcaggtgttttatattatcattcagttctttagtccacaaccaacggaaataaggattcaaaggaagaaggaaaatagtttagattgggaggactggcaatattttgccaggaattgtggtgcttttggaatgaaaaacaatggagatttggaaaaacctgattctgtcaactgtcttcagctttccaagtatgaatatttttaaacaattaatttaatagactgattggttattaataatgtacaagtatgctagctctctaggctggtggagacttcccttcaccaccaacttccttgaggcagattctcctaagtcttatccctaaattgggcttaaaactatgtttaaagttcttgtaaaagacattagagtgactcttatttcaatctcactgatgtttcacaatctgattttcagattgtttggcaagttatctatgtaaatagaattttcattatgttttcaaggaactgttttagtgtggctttctatgataatcctgtattgtttatatatgaaatatatggaatatgcttttcctagaatgaataatttaagcttttattgatactgtgtagtaatttctcaacattttgatttctgttttgccaaaaatgtgaatagattttcatgacatcgaatttctttcattaacagttttactccatattcccgtggcaatgtcacatttagcatcctgacacctggaccaaattatcgtcctggatacaataacttctataataccccatctcttcaagagttcgtaaaagccacgcaaataaggtttcattttcatgggcagtactatacaactgagactgctgttaacctcagacacagatattatgcagtggacgaaatcaccattagtgggaggtattattatgaattttgttttcaacaaggtttttgtcatacttactgtcttaacagcacattaagatgtcagagcaagccagatttcaagctttacattttgaaatgatttcatactctaagattttaggggaagatctgtatgtgagtcttttctctatataacattgttatatatatatatatatatatatataaaacgtattttataaataaatatatatatatttatatatacaggaattgattttcaaaagctgttgcttttagaagctatgatactctgaatctgacttagaagtgatttatccaatattttacttgatttgttctggaatataattttcaaatattctcaaaagcaaagagatggagctgaatttggagttgtaactatagcaccagagagtttttaagtacagatcttgatctacctgagttcatagtgcacagttccatgggtaatacttgtttttctttagtggaaagatctgatatgccctaagtagtttataaatgtctgatcataattgagaacatgactcacaatatttaaaaagaaatgacagctgcaaacctaggcagcatactgtctaatatagaaatgtacatatagagtatatttagaatggattgttctggaggaatgataggccttgtgaataaaatatgtctttaaaagcagaccaaaataccagtatataagcattgtttgtttgctaagtcatagcataatgaacaaagcaatactattaaatattcatcatctaactttggaaaaaaaaataaaaaaattgaaatatgttaactgcattctgcagtttattgtcaactttatattcttttttctttcttttttttttttttttgacaggcttttgctctgtcacccaggctggcatgcaatggcatgatcatggctcgttgcaacctcgacttctgggcctcaagtgatcctctcatctcagcctccaaagtaactgggactacaggcatgtgccaccatgcccagctgattttttttttcactttttgtagagatggggttttgccatgttgctcaggctgctctcaaactcctgacctcaagtgatctacccgcctgagtctcccaacatgctgagattacaggcgtgagccaccgtgctcagcctgaactttatattcttaactgtattttaaatagtgtagtaaatgccttcccttggtacgtggttggtatagatataaaaaattccatttccctttagaggttggcttgaaaattatctttacaatacacgggtttggatattggtgacagtccttctgacatttccagataaattaaaaacgtgtatggatatccacacgattaaggagaaactgattttgtatcaattaaatatacaaaaatcttccctgttaaattcacataatgcatatagtcctaggaccttaaatatattcacagttgagttggtgttccttaggagtgtgtgatgctcatgtttgcagatgtcagtgccatggtcatgccgataactgcgacacaacaagccagccatatagatgcctctgctcccaggagagcttcactgaaggacttcatgtgagttctattttatgcatggaaatctaaaaaaaaaatagtagagatggtgactataaattctatgaacttaatcttggcctaacaaatgaaaataaatttaaaaactgatatgaacttaaaatgtcaattattgcagattttttaagaaaaataacagccatcaattaagttgaaattgtagtttttaaaaataatttcagccagagaaattacaactgaaaccaaaccctaaggttcttttctcttttgtttttctttctttgtttcatcagcattatcatgttttataaaacaatttttaatgtgtttggatagcatggcactaaacaaaaaatagtttgattcttactaaagggtatttatacaaaagtatcaataaacaaaagcatcgttagatgaagaacaatgtttatgtatttatgtcaatcaaggttcatttattgctaatatcaggcattttaattaattgaaaatctatagtaaaatgatttatgagttatgttactttagttttctgtgacgatcaggggaattccatagttgaggtggaattttagcttcatctttagggaaaagaggtaagtggaaataaaatcaagaaacattcgttggtaggaatatctagcaacaacatcagaaatagctgatatgaaagacggttcagcagcagtaacaattataccaataatgagagtagataatatagactcttcagtaaatatgtttaagacaactggctgctaatttgcaagaaaataaaattagagctctactgattgtatgtacaaaaatgtatgtggcttaaacttttagtgaaaaataactataaatatattaaaataaagattagaattctatatcttaagttgagggcttttatcagctaagcaaatgaaatacaaacagaaacaaacatctggagctatgaaggaaattaatgacatattctgttatataaatatttaaaattctacacagtataagggttaacataaatgtaaggtagtgataaatgatggattgatagaaaatatttgcatcatgttaacaggtaaagagttaagattcctaacacacaaacatttacaaaatattaagaaaaatataacagtctgataaaaatgagcaaatatatgaacaagcaatttacaaatgaacaaattgtaactttaataaacatataaaagattacccaacctcagttttaatcatattcaacaattgtttttaacatttcaaattagcagaaaatataaagattggtaatatttagtacttgtgggaatataacctttaacacatcactgatgggattgccaattgacacaatagttttggggaaaatttgtccacctctactaaaattaaattttcaaatatagtgaactacattatataattgctgtcattctgaaaagcagttcttcaatgacaagtgtatggaatggtgtattagtctgtttgcattgctgtacaggaagacctgagactaggtaaatataaagaaaagaggtttatttggcttgtggtactgcaggctatacaagcttggtgccagcatctgcttggtttctggtgaggcctcagaaagcttacaatcatggcagaaggcaaagccagaagccagcctcttttaaacagccgtgtctaaacagccatgaactaacagagtgaggtctcactgctgaagggaaggcacttcatgaaggatccacctccataacccaaacatctcccaccaggctcacctccaacactggggatcacatttcaacatgagatttggaggggacaaacatacaaactatataaaatgcttatatttctatcattttgttacataaatatgggcttatatgttagtgcattttagcttttcagatggtagcactgtctcatacactcatgtatgacttgtgaacatctctgcctcttggaccttgccctacacttgtgttttagttagttacttcacttctctgtgaaatttattttaggatattatagagcatcttgctttttaaaaaaccatctgtaaaggttttggcaaattccatttctgtcttctgattcttactctgatctaatttgcttttgactgtaacattagtgagaatagttcaatggtaagaatattatctataatgcagactttctctagcacattcaaaacgtagtcccactcctcagtttcaactaagagtctttgatttagttatggcctactttctttctttctttctatgtgctcagaccaaaactttcatgttctaatttagatattcttttgaatttattttctagatcactactttatatacatctagtcctcaccattagtcaatacttgctttaaaagaagaaatcttttatggttttcttttggatttctaatgcctagagtctttgcatttgatttcattagtatattatgaggaaaaatcttttagaagaactgattttaatatgcttgattgtatggcttatcatattgtcacagaaatgaaattaattggattaacttgattgatttattcttcactgagccataattgtgtgtttaaatttttgccaattttatttgttctagattttaaagttaaagcaacatttattatatttttctactgtcttcttttgatcccttaagatggacacttacttccttataatcagtgatttctttcattaaccttgtcctctcctccacaaagccactaacaccccaattaaaaaatgctttgggatgaatttagcagggcaccttgaactgaatatgtctagtatttgcaagctacagtttggctaataccttcatatgatatgttcttttctgagcttctcttgctttctgttgactagtcagtcggtattagtctctctcatttgcttgtgacgtcctgtcttgttttatctttctgtctttaattgctcacagttaagtgttggatattttctgattcttggatgatttcatgcttccccttaaaaatagagccattaaatgaatgaaggctcatgattggtttcagaagacaagttgggattttcagacttggtctcaggtggtgaatgttggattatgaactagtgaattaattaactataatttgggttgagaatacattttaatgcttcttatttagaccttaagtaccttttgaaaacaaaaatgaaaaactaaactttttttgttattttcctccttgacatattttgatagtttatgaatttagccataaattttaaaaagcaacaaatataatttacttagcaaactttggcaaatgcaaatgcagctgcagggaaaaagtcaatagactgttaagttgaatgatttctcagtcctatgatattttcaataatgtgttgaaaatgaaaaatgattttatagaaacattcataggcatgacattctcctttgttaccattcaaagtattttaatacaagtagagacttacatatctgagaaaagtcgtcttacggtaatttgaaaatatacctattctaatgcttttcttgttgttctactttttaaaattatacgttttaatataagccattcacttcctattgggatccatgttctttttaagacctggacataatccaaaaagaatgtcttcaattccacagtgttatgctatccattaataatattacttaataaacagggcttttgtgaattatattacagacatttggcaaacagatgaaaatgtaaggactgaaaatatgccaattcttggcaattgtctttcctatgagaaagtgtttttagtagaaacaaaaatgaatgaagttgagaaaaggtgaatggtgaattcaggggcaggttcacatatttagccatcctaaggaattttccgtacaaaatactattcatttgtttataaggtcaatgtcacaaattggtggctcacaggtagaaacagtgtttaaacagttttaatttaattttctgcaagagttttcactttaaaatatttatttattcttcaatcttttttatttatttatttttttgagagggagtctcactctgtcaccgaggctggagtgcagtggcatgatcttggctcactgcaacctcagcctctcagcttcaagcaattcttctgcctcagtctcccaagtagctgggactacagctgcacaccaccacacgcggctaactttttgtatttttttttttgtagagatgggtttcaccttgttggccaggcaggtcttgaactcctgacctcaagtgctccacctgcctcggactcccaaagtgctgggattacaggcatgagccaccactcctggccctcaacttttattttaagttcagaggaacatgtgtaggatgtgcaggtttgttacttaggtaaaggtgtgccatggtggcttgttgcatagatcatcccctcacctaggtattaagtccagaaaccattagctattcctcctgatgctcttccccccacagcccccaccatccctaagaggccccaatgtgtgttgttccccgacatgtgtccatgtgttctcataattcggatcccacttgtaagtgagaatacgtaatgtttgattttttgtaccggcattattttgctgagaataatgacttccaactctattcatgtccctgcaaatgatttatatttctggtaatacacagtaatgggattgctgggtcaaatggtatttctgcctctagatctttgaggaatttccacactgtcttccacaatggttgaactatttatactcccaccaacagtgtaaaggtgttcccttttctccacaaccttggagcttctgcacagcaaaagaaactatggtcagagtgaacagacaacctatagaaggggagaatatttttgcattctatccatctgacaaaggtataatatccagagtctagaaggaacttaaacaaatttacaagaagaaaacaaccccattaaaaactgggcaaagaaccctgagttagcgagttgttgccaggggaggacattaatgtcttcttttgagaactgtctgttcatgttcattgcccaatttttaatggggttgtttgtttgagaacagttctcaaaagaagacatatgtgtggccaacaaacgtatgaaaaaaagctcagcatcactgatcattagagaaatgcatatcaaaaccacaatgagataccagctcatgccagtcagaatggcgattattaaaagttaaaaaatgacacaaatttttaattcctcacttctcttaatcagaacatagtctaacactgtgtccatttcctgccatcaacaactcactgattcagggtgacatttaccacatttacaacagtatcactcttgggcttgctacaacattcactactatgtatatccttatacatgggcgacatcactttggtgaactacctggccttgaaagactcggagcttcttaacctcctaaagcaaaactgatggatagattgagacactagaagctagaatacatttttaattattctgagtagagaaagaccagctgttcattgctatattcattgttaactcctatttcttttacccctttataaaaataaaaactcacaaataaccgaaaacaactcaagaaaatctattagcaaagacactgtttactctgagatgaaattaaagccatgcttactttttttttaattacatttttgacatctaaaaacatttaccttggggagcctcactgattctcctctgcactctttgaccaggaactccgatacatttttgtattgtactggcaattttaaggccttgactttaatgtatgatacataccataaatacttcactcatagagaatacttttagaatacttgtcgcatttctttccaagaatgaaaaaaaagcagtaaatgcttaatttactaggctcactttagaactgatttagggtgaaacaaatccaaaagcctagatgctattcattaactttcatacaaagttaaatatttcaaagtagaaattagaaatacatggtattgaacttgcatgaatcattatatatctcacaagttacaaacatgttatttataaatgtttaatttcatttgaataaaaaatagccactgttacttgcatttttaagtaaacttttaattttgagataattatagatttatatacagttgtaaaaaataatataaagacaatttgtgtactctaccaatttgtcccatggtaacatctggcaaaactagtgtttttttctttttacatcaaaagtgtgatttgtgtacaataaaatatacccacttaaaaatatatagtttgatgagttttggcatatgtgtaccctgtgtaatcaccatccctgtctagagatggaatgtttcactctcccaaacgttctcttatgcttctttgcagtcagtgctgtctctgaacccccaatcccaggaaaccaccaatcttatttctatcaatacagattagttttgcctgttccaaaatttcttagcatagtgttatttggtatgtaatattttcgtacataggcttttaaatcccacctcacccccacttttagatcattccctaattacatgtgctgttagctttactgcaacatggtatctctggcccacttaatcagaaatccattataagtatcaaagtgtatatattaagctcataggtacataatacaagctaggaattggaagcctgggtttatctgtcaactaacatatttgcaaagctataatatatttattacttctttttcttatctagtactttctttacttgatctaagagttcaagtgttgaatagaatctagttttaagaaaagtgttgtcagttgaaacttgaatccttatgagttgtctttttcctttaataactacatttacctttcggggctctggccaagagtgatgcaatgatcagtgtctcagccaagcattggcacttcattggctacttagctattctttcgtcattttgtgacatcattacctgcaagggtagccaagccttcacagagcaatttattagtaaccatgaacacttcttattctttggctctaacttatgacccttttataacattaatcatagatcttatgaattaactacaatcaaactatcagtataaatttttgttagcattataaatagcacagccagcttgaaactttttatataataagccttcctaccactcaataatttgaatggtgccaacatcacactctagaatgcttattatataaatgaatatttctgttatttttgaaagattcctttagagcaccaaagtccaaaagtatgaatcatcatgactaatttgtgtcatatttatattatatatcaggctttaccactgcttattttttctctgtttgttcgcagattttaccctaaatatattttatttatattttaattattgtaatgctagtaaattaattcatttttatataactagcattcacacagttcatattataggatctacatttgatatatgtttagtaagtcaaggtaaagaattttctttcctcactgacatgatgatattattaatctttgaaaaacacttgtactagttctttccgtgagataggtatgtgcataaatgcttttaaaatataagttgaaaacatgaaaaagaggttatgagcatggagataaattaagacagccttacagaagaagcaaatagagatagtgaaagtataaacatagtaaaagaaaagataatatttgaagggataagagtaaagaattatctaaaggtgaggaatgacatgatttttctgaatcccaagtaggctaagaaaagtaaatgcatacataggtataatataatgaatccaataatcaccaaagaccaagcagccagaaagacagaaatctgataatcaccaaagacagaacagcatcctaaaaacagccagagagaaaaatacaaagtgtaagaaattaatttctaagacactactgatatatttctcaacagccacaatgaaagccagaagacagcagagtagtgcctttgaaatgcagagagaaggcaaccaagaaatatggaattgtatttgtagtagtaccatcaattagaaacaagaaagaaagaatgcatttttagtttacagatatatatatcaatattatcaccagcagactctcaataaaagaatttttcgagaatacttttcataaggatatataatgtttccagaaaataggcctggtgtgaaggaaggaattgtgagcaagtaaaccagcaaatatgtggataaatatagaggaaaatttactgcgttaaataaaaataaggttatatgtaagaaagagtataaaaagtagcaggataccattaaatggtcattaaaaatagcatttaaagggaaggggtaaactccaacttcagctccctctagccattctgttgcaccttggggtaagaagagcagttactgagaaatacttgtaaagttcacagccaatgagcacagggctcattaaaaactgaaaactaatcctagaatcatagaacaggggtccccaacccctgggccactggtcagtagtggtctgtggtctattagaaaccggactgcatagtaggacgtgagcagctggtgagctatcattacttcctgagctctgcctcctgtcagatcagcagtgacatgaagttgtcataggagcataaaccccattgtgaactgtacatgtgagggatttaggttgtgcactccttctgagaattcctgatgctttgaggtggaataccttcatcttgaaaccattccccatgtgctgccctcacacccagttcgtggaaaagttgtcttccacaaaaccgatccctggtgccaaaaatattggggaccactgccatagaacgctttccctcccctctcatcttaccaccacaccatgaaaggcctgtttgccagagttccctttactcagtacatcatgtctggatttcaacaaaaagttacaaagcacactaaaacaccaaaaacaaacaaacaaagaaacaaacaaacaacctcacagtttgaagagagagagcaaaaatgagaatgagactcagacatggaaaggatatggaaattatcagaccagaaacttaaagcggctctgatgaatacactaaaggctctaatggaaaaagtagacaacatgcaaaaatagatggcaatataagctgaaagataaaaattctgacaaagaagcaaaaagaaaagctagagatcagaaacactttcatagaaataaagaatgcctttaattggatcattaatatttggggacagctgataaaagaatctgagtttgaagatgtgtcaatagagactaccaaaatagaaaggtaaaaagaaaaatgactgaacaaatagagcagaatatctaagaactgtgagacagctaccaaaaatgtaaatacatataatggggaagaagaagaagaagagaaaggaacagaagaaatatttggaacaataatgactaagaatttttcatattccaaatgcagaaaaatcaaagttagggaaaaatatcttaaaaggagcctggctgaagggggaacatctagcctatgaaaaagcaaagataagaattacattctacttctcctcagaaagcatgcaagcaagaaaagtggttaaatagttaggtgttgacagaaaaaaaaaaatccacctagaattctgtatcttgcaaaattatcctttaaaagtaaaggaaaaatactttctcaaacaaaaaccagtagacttttcttgccttgcaagaatgttaaaggaagaacttcagagagagagaaaaaatgatacaggtcagaaaactcagatttatgtaaagaaagggagaacattagagaaagaataaataaaataacttttatttttcttatccttaattgatctagtagataccagtttgttcaaaattataataagaacaatgtatttcattattatagcatgtgtgtaagtgaaatgaatgatagcaacaatacaagacaccagagggaggaactaggaatactttattattattaggtactcatgccaccttttaagtggtatcgtgttatttaaaagtcaacttggaactctcgcatgacattattttgtcttgatagttcaagctccacctgcggttctcccgtcctccatgccaggtgtcaggggctgctctggatgttaactcttccgccccatgacttccagttccaaaatggcggcacagaaacaagctgccatgccacaaccccaccgcgcccctctcccgccaaaaagaaaaattaacaaatatacattgctgagattatcaccagaaattgtcacgatagtccagaactcaaatatgaagatataactgttcccagggccataaggaaatgagaaacaccaagtggatggtaagaaacctgactttcacatttgtagcactcgttaccccattttgcctgacaccaaatatgcagaagattttcctccaactcacttttttctacactggaaaaattaagattgaggtaaacaaccagcttccccagccattctgggttaccggaaagagacctgtcctatccatgcctcaacccactggaagcgtcatgagtgcctaaagggagacatattcctgaagataggcagagacaaagggggatgtaggtctgtcatccccagcctgggaaagtctgctctgtaacttgaccaatgcagacacaatgtcagagtagctgcttagcagcactatgatgcaggaggattatttcactgttctcctcggcacaaacccttaggcagccttcccatactgtcaggatattccctttgggacctctcttgttaagaagggcacaattggattgtttactgaagccaaggcgaacctgggcttaaagcgccccctatagctccctagaggaagcaatttagcagcaaagacatagatgtatgtccacaagaaaaacagcagtaggaaactatgatgtctccaaacagacaaagcagggaaccagggactggccctaacaagacagtaatatgtaagctccctgaccacgaattttaaaatgcagttttaagaaaactcagtgatctccagtagaacacagaaaaataattcagaaattcattagagaaatttaacagagattgaaattttaaaaaatctatcagaaaccttggaactgagaaataaatttaccgaactgaaaaattcactagtagctctcaccatcagaatggattgagcagaggaaagaatcagtgagcttgaagacagaatatttgaaaatatatggtcgaggagaaaaaaagaacacaaagaaatgaagatttcctacaatatatagaaaattattaatacctcaaaaggccaaatgtaagaattaatggtattcaagagggagttgaagaggaaggattagaaatcttattcaacaaaataataacaaaaaattccaaaatttaaaagtatacttggattagttataaatgtatattataagctttatagggcaacccccaaaaaagttttaaaaaggtatagttgatatatttaatacttacaaaggaaagaaaatggaaccatgtaaaaatgctcaactaaaaccacaaaaggtaaaaagtatatagaaaacaagaatagaaacaaagaacaagggcaatgaataaaaagtagtagatattaatccaactatgccagtaactactttgagtgtcaatggtctaaatataccaattaaaagagagagattgttagaatgaattgaagaataaaaccagctcattttataatgccaacattaccctgtaccaacatcagacaaagaaattacaagaaaagaaaaccacagaccaataactctcataaaaatagatgcaaaaattctcaacaaaatattcaaaataaaactattaagcaatgtgtaaaaataattatatatcagaaccaagagggatttatctcaggtttgcaagactggttcagcattcaaaaatcagctaaagtaattcctcacatcaacaggctaaaggggaaaaattacaagattatatcaataaatgtagaaaaagtatttgacaaaatcaagcatccattcatgatcaaaactctccacaaataaggagtagaggagaacatactcaacttaatagaaaatatgtataaaaacctagagtgaacatcatacttaaggataagaaaccagaatctttcctactaagatcaggaataagacaagaatgtttcctctcagcactccttttcaacaacgtattaggaaggaataaaaacaacaacctcatttcaaaataaggcagtaaaggagaacgaaagaaaaaggatatatagaaaatagaaattccaaataaataaacaatcacaacaaatctaaatgtgctgaacatattagaattatgagactgtctggctgaaagagaaaacaacatccacctattgtctgagcagaggctgaattagggcaagagaatgtcttaatcacaaactttacaaaagcaccaaaaacaccctattaagcaagatctataatatttttatgttatatttcaaaaagtcaaatgatttagaaatgtataattaaaaatcaaaattttaagtaaagacacattagtgttgcttgttttatggtcctgtgttattttgtaatgggagctgttgtttctaatcagtccataattcctacctaccagttttataaggttggcatgtacctgtctcatagaaggttttacaatcgtctagaaacagactaggcatgatgggacattatacacagctatttttttaaaactgtagagtgtttattaactttttccatttggctccaaagattggtaaatattttctagttgtatacagaggttcgtatttttcctttgccctcatgctgcaatgcagctcagcatggtacttgtgctgagggtgtgagagacatactcaaaaaacaagcacacttcaagtttgaaaatttaagaaagctagcatgagctacataaatattaggcaaaacagacattactgtttcattaaagaaaaagaggcttattgtataattataaagtataaaattctaagtttacatgcatctcataatatagtttcaaaagtataaagcagaattttatagaaccagaaagagaaattggcaagttctaccatcagcatagaagaatttaatacatctcttattaaaaatgtctttttataaaaagaaagaaaagctacatactagcagttgtcattagcaagacaacacatatataactgacaaaggtaacatttaaattaagcaaactatttgaaaaacagacaaaagaagtgaacaagtaattcacagaagaagccagaagtggcaactgaaatggtcaatatacatgtaaagacatgtgcaactttactggttatcagtaaactaaaaaaaaagaatgtgataatattttatactcatcaagttgtcaaagatggcaaaatctggaaatttcaggaactggtaagtggggactcatacaccacttatgggaaggtgctgctgcactatggaaaacaatttgcaaatgtctacgtggaacactttacagtagtggatatgaaggaatatagctatcacatcaacatgaccagacttctcaaacaatcatactacagaaagcttgttttagaataatacatacactgtatacacttatataaattttaaaatcatacaaatagaaagaagaaactgataaaaggataggaggcaggactaacttgcagctccccctcggacagacagagcagcatgtgaagacacacatcatgaacttttctccaagaactactgcagcaacataccaggaaagccacgagaatccacagatcctttgaaggaaatagattgctgctgcaggctccaggagacagccgaaaaactgtaagtgcccaaagtgtgaaagggggatcttccacccctgaacacatagccttcctggggaacctgaaggtccaggtcacaggtgatggatttggccttacctggagctgagacaaacttagagagctgaacaaaatataagggtaaaggaagcagggggaagagccctgtggactctctcagcccccaggaaaaccatttctgactttgtctcctagggtccttgggtaggactgccagtggaagtggggaaagaccacaaggagaaggaaacttccagatgaactctgtaacaatttcgactgaatgccaactttcctagcagaatctgggggtgagggtgaactgggagtgcagacacagcacagaagttgcatcaggcagggaggtgtgaaacctgaaacccctgcttgcttttccagtggggagacctggagcaggggcaagtcctcagccctgttcacccattgcctggaaataaactcagtgctgttgtggagagtattgtgggagtgagactggccttttgggttgcatgggagctgggtgaggcctttcactgccagctttcccctactttcctggtgacctgtatgatgtagcagaggcagccataatccccctagaaacataactccatcgccctgagaaccacacccccaacactcagagcagcttcagcaaggcctgcccaaggagagtctaagctcagacacacctaaccctgaccctacctgatggcctttctctacctgccctcgtagccagacaaaggacataatctcttgagagctctatggccctgaccaccgcctgagaaacttatccaggagactctagagcaagcttgtatcctccctatgctactgccgttgatgctctcttgaaagcgccacctcctgtctgaaggccaaccaacacaaaactagtgcaataaacaaaaatacaacaaaggaccctcacagagtctacttcactcccctgctatctccaccagagcaggtgctggtatccagggctaagagacctgaagactgatcatatcacagggctgtttgcagttactccccactaccagtctggaggctgctagctccactgggtggctagatccagaagagaaacaacaatcactgcagttcagctctcaggaaggcacatcctggagcacccacatccagggagcacccacatctagggaacacccacatctggggagcaccctgtgggaagaaagaatctgaacaacagcacttgagccccagatcttccctctgacatagtctaaccaaatgaaaagcaacctgaaaaacagttctagtaatatgacaaaacaaggttctttattatccccaaaagatcacaatagcttaccagcaatggatctaaaccaagaagaaaactctgaattcccagaaaaagaactcagaaggttgattattaagtgactgaaggaggcaccaaaggtgaatatgaactcaaaggaatttcaaaaatgttacaggatatgaacagaaaaatctccagataaataaatagcataaataagaagcaatcataatttctggaaattaaggacacacttagaaaaatgcaaaatacactggaaagtcttagcaatagaatccaacaagtagaaggaagaacaccagagcttgaagacaaggcttttgaattaacccaatcaaacaaagacaaagaaaaaaaaaaattaaatgaacaaggcctccaagaagtttgggattatgttaaacgaccaaatctaagaataattggtgttcccaaggaagaagagaaatctaaacgtttggaaaatctatttgagggaataatcaaggaaaacgtccccaaccttgctagagatctagatatccaaatacaagaagctgaaagaacacctgggaaattcatcacaaaaaggtcattgccaaggcacatagtcatcaagttatctaaagtcaagatgaaggaaggaatcttaagagctgtgaggcaaaagcatcaggtaacctatgaaggaaaacctgtcagattaacagcagatttctcagcagaaaccctgcaagctagaaggaattggtgtcctatccttatcctccttaaacaaaacagttattggccaggaattttgtatccagtgaaattaagcttcctaaatgaaggaaaaatacagtctttttccgacaaacaaatgtttagagaacttatcaccaccaagctagcactacaagaactgctaaaagcagctctaaattttgaaacaaatccttgaaatacaccagaatacaacctccttaaagcataaatctcacaggacctataaaaaaaaaacacaatttaaaaaaaagcattcaggcaacaaatagcatgatgaatagaaaggcatctcacatcctaacactaacattgaatgtaaatggcctaaatgcaccacttaaaagatacagaatggcagaaaggataagaactcaccaagcaagtatctgctgtcctcaagagactcatctaacacataaggactcacataaacttaaggtaaagaggtggaaaaagatattccacgaaaatggacaccaaaagcaaacagcagtagctattcttatatcagacaaaacaaacttcaaagcaacagcagttaacaaagagggacattatataatgataaaaggactagtccaacagggaaacatcacaattctaaatatatatgcacctaactccagagctcccagatttagaaaacaattactactaaacctaagaaatgagataaacagcaacacaataatggtgggggacttcagtactccactgacagcactagacagatcatcaagacagaaagtcaacaaagaaacagtggacttaaactatgacttagaacaaatgtacttaacagatatttacagaacattctacccaacaactgcagaatatacattattcatcagcaggtgaaacatcctccaagatacaccatgtgataggccacaaaacaagtctcaatacatttaagaaaactgaaattatatcaagtactctctcagaccaccgtgaaataaaattggaaatcgactcaaaaaggaaccctcaaaaccatgcaaatacatagaaattaaataacctgcttctcaatgattcttgggtcaacaatgaaatcaagatggaaattaaaaaagtcctttaactgaattgtttgatatagtgacacaacctatcaaaacctccatgatacagcaaaggtggtgctaacaggaaagttcatagcattaaatgcctatatcaaaaagtctgaaagagcacaaatagacaatctaaggtcacacctcaaggaactagagaaacaaaaaccaaacccactcttattgacttaataaggaaattaaaaaaagtatgctgagattgctaagatctattataataatgaatcttctatctgtgaaatagtgaaaaaaaaagaaattagtgctagatttgctgtcaaaccacaaagtgcaaaagttacggccgcagtgctagataagtgcctagttcagattgaaaaagcattaaatttgtgactggaagacatgaacagaaaatatgtactatatggaaccaaaatatgtactacatagtacacatagtaccaaacccagttgctgtcacttggcacatagagatctggcatctactggaggtcttcaaatgtattccttgtggaaaacaggactacttactatactactaaattcagatattattagcggagtggaatatatatggcagtatcttgtttctaagttgagtggtacataaaatggtacaattctttttttaattattcataaatttatttttaatatttcagtataatttcccttaaacacaataatatgattgattaatctatcaggaatgtatcacctatgtaaatactcatgctactactaaagacagagtggaggtgactctattcacaatggaataaccattactaaattcatgattactgtgtacatttatagttttactgtaaagattgatcatttgctagctttagtcactcaacaaatatttataaatgccttctatgtgtagtgcattatgctagagtacagccattatgtcttgattacagatgcaagtatttgaaaatattgaaggaccttcatttgtgaaattcaaaaaagattccctggcagacaccaattactataataaatagagatgacttcagtgcaaacaaatgattcaggctaacaattagtaattaacaaataatataaatagtatagacattttaaatcttaaagaaaaatttaaatgcagcaatacttaagaaagggttttttaatttactaatgtagtaatcaagtctaatactacaaaaaatttctaatatgaaataccctttatatttaaataatcaaataccttgtataccagttgactaagtttagaggaatcttaaatattaaaaaacatcaataacgccttatacttcttagtatgtgaattcgtatttgtatgatgtatattattttggagagttgcctgtaagcaccatattaatataatgaatgaagcttttcttcattgaagtcctttgtaaaataatgcaggttatcctgaataaatatggtctctattccaggccatatttcctggaatatcaatagggttaaattattatggttgcaataaaatagaattgctttatcttgtccactatctacaatcttgaataaactttaaaatcctccttctgttctcttaagggaacgtggtgtgtccccatgtgtcttttttatttagtgccctgaacaatccataaataagaggaagaaggaataaagaaggacagagatttcaaaggagaaatcaaatacctaacaacatgcagtattgaaaattaacaaataagaatgcaaggcctctcatgcaaatggttccatctcattcaaccactagacataattacttctgtattcacaaggcctacagtaaggaaatactgtttaaaaaaataggctatcaattatatttatatatagacaacatgtagactgaaggattatccgaataatcctgcctagagtttctgtttttctaaatataggttttatgtcacgtattacaatttgtttcattggataattttccaatcttccatttcactttacccatagaattagactaggcattacttgaattagaatgtttctaaaaatagccacttatattaatagttgaaatattgaagtaactatgtatgatgtgtttgtcgtcattgtattgtcacctatgtttgatcagtattgtccaacagtattagtagttatttattttatgctattaatttcagtatctagagagtgagtaagtacattgtatctgtgaacactttaattatgtaagaatttctagccaagggaaagataattactgaaaaagggatatgtcattgaaggataaacacgtggcatttctgtcttctcagtggtaaagaatagtatttgttttggcttttccaattgaaattacataatctgtaggtaaaaattcacaggtgaagtattattgcatttgcctttaaacctttaatgttactattcaattaaatgctagtcacattaaagtacagtcctgtaatgtgtcataaatgcaatgagtctgttaggacattcactcacacattcaccaaatatatatgatcacctcccatgtgcaaagcacagagccattttctgtctagattctctatgtagttgggcactttatctgtgttcccctctgaaatctatcactgataataaattaacaagtttgtctaacattacctttgccatgggaacattagagctacctagggacacttccattggaaaaaagatacctgagtacactaaagtttttatgtttataaagatgatttctctacctagtagacaaatcacagtgaaactggatcctttgaattaccatggaattgctccagccagaggaaaggggaagccttgaatagagccggaggacaattactattattagagatttaggctcttaacatttccaacatagggggctggtttctactgatgagaaagggaaaatgtacagattttcagagggtctgcaattcattcaggccatctgggaatagttaaaaaaattacctcttttattcagtgagcagtactgtaacagtactaaaaagtgatcattttataatctttcactttgaagcagattgtctttctctccttctcacataggcagtgctgcatccatatctctaaattttatagccaggagtggaataactacatcttttggtttctagggctttgctgtccagtttagactcagcagaaagtaaagatggactgagccagagtgactccagtcaacacctctctccctcgaatactattttcggtccctgaagccagtataaacatggagattagaagtgaggtctttgaaggaaaacatccagatatataaattgagtacctactatgttctagggctccttctaggcacttcttcaacatattgaagacaagttgttttcgatgactcattgtgatcattatgaacttaagcttccaaaggtcattgacactgggagctctcaggaccttgaagggaaattttctccctagcccccagccttttgcaaggacttcatatatctttgtctaagaggatatttttcttccttcttttttcaaagatacatagtaggcatttaagattgttgtataagtgactgaataaataaattgctcttgcagttaaattacttaaacttgtattttacacaagtttctactttctctgtaaatttgaaggtgttaagaaataagtaaaattgagtgtgtggcttgtcatggtggctcccgcctgtaatcccagaactttggtaggccgaggtgggcggatcacttgaagtcaggagtttgagacgagcctgggcaacaaggtgaaaccctgtctctaccaaaaaatacaaaaattagctgggcatggtgatgtgtgcctgtagtaccagatactcgggaggctgaggcatgagaatctcttgaacgtgggtggtggaggtttcagtgagcccagatagtgcctgggctccaacctgggcaacagagcaagactctgtcctttatctccaaaaaaaaaaaaaaaaaaacattgagtctatcaggagtggagttgataaaaatgctttggagactatgggttatctttgaaagattgtctttgctgctctgtaatggtaacgaagaaacactatacttcagtttaatgatccataagaaataactgtcattgtgtattattagaatataatgtaataaaataaatttcatcagtgtcttctagattcaatgactattcaatgattttcatacctgaacatgtcaaagtatttggctgcaacttagcggagttgattagtagcctttaagaagctatcaaaatgaaagcagttaaatgaatcagtggtaaaggtccttgaccctgatatagccattgtctaatctcataatttgggcattcagggacatatcgggggaatccagttgttacagaagaaaccgaaacataattgaaagtgacaaatgatcaactggagattgggaaaacatgaaatagaaaaccatttgcttcaggagctgcctaaaatataagatacacacagagttcttgattttaaatcaaactttaaaatcactggtagaaaaggcagttgaaaattatgagaattcaaaaatttacttataatgcacttaccaattattatttcttccattttgtcatggttatccttgtattatctgaaacgagttgttaagaaccaattatgggaccaagaatttaatacttcatgaaactttataatcaaagaatagactacaaagtattccttctgtctttgcaaaccatacaaaatgataatagaacagtatcatctttaggatcaaagacccaaataggcattggtgtgtcatttagttgcatatgtcttaaatcaaattttaaaacaaatttaggcatcatctctcaaaatctttgcttctgtatattaatcccattgttttggaaaaaatgtatattttttacaaatcatactctgtttactggtggctcaaaaactttttagcttacatagtagttgaaaagagaatcattttttctgcagatttttgctcatctgtgtgtaatttaaaactgaaacatattaattttcttaggttttcttagtgaaatgttacatgcaaatgatgtataattatcttgtaactatccatgcagttacattttatttgctctcaatttttaatacattagtaataaatgtacactgtggaaaaaataaagttataaactttatctgtaaacctaccacccaccggtaaccccagccaataatcttagtttatatactttcaggcattatattattgttattattagtaaacctgtctcatctgtctctatcttcttaaaattgcatatttatatctatagataagtccacctttatctagaatagaggattatactctgtatattatttttaacttgattttcaattcaagctgtattatgaatatatttctctatttatatttataaatgttagcctttttttttttaggaattggaacatcttaaaccactctcttgcttttgggcatttaatttgtttccttctcttcagtattatcaacaccccattattaaaacagaaaatctttatcaagcagctttaaaaacatattctcggacaggcacggtggctcacgcctgtaaacctagcactttgggaggccgaggcgggtggatcacgaggtcaggagatggagaccatcctggctaacatggtgaaaccccgtctctactaaaaatacaaaacaaattagccgggcgtggtggcaggtgcctgtagttccagctactcgggaggttgaggcaggagaatggtgtgaacctgggaggtggagcttgcagtgagccaagattgcgccactgcactccagcctgggcgacagagtgagactccgtctcaaaaaaaaaaaaaaagtattctcctaaattctcagtggaatttctgggtcctgtggaatgtatacatatgttgctcctcctaaaaggagtggataaactcctctcctacaagcagtgttctgcactggccctttctacaaattcctttcaccctggtattatcataatctaaaaaataataatttgagaatcaaaaaataacagctatgcttgttttcttcaggaaaacagaacaggttatccatatatctgcagggtttttttctccacaaaagaaaggccagccattttcaataacaagtagtttggcaggaccagaaccattccattgggtcactggtaaaatttgtctttggctttaaacattaaggcagccaggactgtgtctttggacattgatacagcatttagtccagtcttatttacaattaggctttttgataatggcttttgggctgacgttaagtataaaatctgaaattagattttttaaagattataatcaaaaagcaaaaatgtcttcctagaaatagcaaaggaatgcttttgctggatttgctccactaactcatgtaggcaatataccaaactcaaacagccagcagttgttttgtaaaagacaaactgcatctgaaatcagtatgacaggaccacagtttccatctcatcacttccaccaacttacatttaagaaagcacaacttgaataataaaaaccaccatagagtaaacaaattcttcaatgagaatgctttgaagtcaagagaaaaataggctcagggcattgtgttacagcaaaattttgcctttggcaaaagttttacgatggaatagggtttttaaaatattgggaatcaggtaaattgcatggctaattgaactggggaagacagcttaatgagctcatttctctccttcaaatccaagaagtcagaaggcaagttttcatctattctttcatttatccaattagaacatatcgtccccacacatagggctactagaagaagtaatagttatgtctgatggctcttaggaagtattgtcaatagataggacctcctctgtagttataactacagatgatcaaattaaccagaaataaattttggtcataaatttcttcttgctccactctgtaggctacctcctccaaagcagatcgtagaccagtgcatttataaatcacagaatcaccttttaatggttatagactatatatagcatagtgacagtcatatactgctggtgctggtcaaacttgagatcaacaattctgttggatttttacccctctcttccttctttttcctcctcttccatattctgactttcaggtttgagcatgtaataacttccaggatttgttttgggcattatttatatattaccacttatcctaagattattttgagtcagataaaagtaagacattctattaagttatcttcattttgaagatgaagaaactaagattcatagaagtaaagaggactctaggagtaactaactgtccattgtcattgttaatgttacttaacctctttaatcctctgtcgtgaatccaataacgatcaaagtagtaggcaagtttgctgagggccaactgtgtgacaagcactttgataactgattggtctttacagcaaccttatgagagaagtattattactctcatattatgagtgagaaaaataaggattaaagaggtacaggcaattactcaagaacacagggctagcaaatcaagaaacagaagttagatgtgagatattgtatcacccaggcctaaaagatgcaatgaaacaacccattttaaatgtttaatatagtaaccagagtatactctcatttgatgagagtatactcatcaaatgagagtatgcatttgatgttacttttcacagtggcctttttgcagttaggaaacagcagcaccaataatagaactaagctgtctgactcccagcctgtacctaaatctctaacttttgattttatgaaataaatttgatttgcagatgggcattgctggtgagggaaatgtaaagaggtcaatttccccactttaaatttttttggctaaagacccatagctgacaatattttaatggttgccacatattcttcttttatgaagtgagtttcattttatatttgtaagtggtttttattgcaaatcatcacctaacagtcaattctgaagactttccataaatgtcaccttgtttgtgaattgttctcattctgtctcctctctaaattccctcaagaacaactttctttggacattaatatcattattaattgtgaattgtcagctaacagcttagcaattgtctatcatgctcctaatgcatggatgatacagagaatataaagtcaataacttgtatttcctgaaagatacatatacagaagccaatcatttcagtagagtgacaggagcaagattgaggtattaatagagtactctgagagatgagaagcgggacaactaccttagcctaaaggtttgcaaatgattgtggggaaaaataatctttatcactccaaaaagaatattacagtgatattttaattgaccatagagtttaacttgaccattgtaaaatgaccaaaagggtgaattattttttaccaattattaaaaagtagcactacctgatataaacagtgtgacctaatgtttacattcttattattttttctcctttttgtctttttctctctccccagctaagtagaaaaaactcactttgttttcatgctaaaattttggaataccattaaacagcaacacactggacaactacattcttatgttttatcttctccctttaagattgttaaaggaagaaattgaactagtggggaaaagtaaatactggccaaaaaaaaatgcttttgactagtgtatgttccaatgatgattatgaaatatgtcaaactgttctaaaatactaaatatgtgttactatttattctgtattaaaatagaacaatagaataacctttgttgtcccaatatgaaaatagtttttaacaatgttaatataaaacaaagagcaaaggaccattatcttggataaacagagagacattactttacatggtttgactcccctgattcataatttaacatgtaactctggcatatgctgggcacttagggaagtcacattaagtatttcacagcaaatggagagtgagaaaaatgattttcagaaatcctggtatttacttattataaatcttgtcttgaatttattgtactttacatgaaatataatttgataaaatgtaattggtttcagtgtgtatgcaaaatgagaattttctgatcattcagatatcaaaattaactttataaatacaaatacatataattacctattaaaattctaaggtgtatttattttaataaaagtctttatcaaacctagataaatctcatttatgattataaatgtaaaactcctaaatttttttttacttggctttatttactattaatgatgttgggtttattaaaaaatgcaagcacagactccaattagcctactaacctattgtataatttatcaattcaataggtcaaacaattaaatcagaacatttaataaaattgacaatatttttttatttttttacaaaaatccatattggttgttttgaagtagcaatttcttcttcaaaatgataaaaattgtctatgtaaaatcaatagtcaatactataaaagctgcaacattatagacattttcattaaaatgagtaaaaagataattatgcctatcacactactataccatataaattaactattatgctgaaaattctggccaataaagtaggggaaggaaataaatataactgtatatttaaaattatgaactaaatcttcactgttttacaggcaaaggaaaattctaatatctgataaaatctttaaagtcaattaaaaaagagtatactaaagaaaaatgaataattttctcaaaaaggactatatctaaccaagaactaggtgaagattggcattactagtatccaaagacataaatactaaaacagtaattgacatattatctaaaatcaaaatagtgaagatataacaattatgggcagaacacaagaaaatggacattctcagatattgctggtgtgagtatgagtttaatttttctagaaggaatttgaccatatttaacaaaatctttaaaatgtttatactctttgataatgtaatttcatctcataattttcttaaggtaatacttagatatatatccactcccgatccccaaaataaaatggaaaaaaaaaaactaaatgtgtaatgattgcagaagggttgaatgttattttatgagaaatataagaaataatgcagcaaaatacatgatgtttaattatacaaaactatgtagtaatacaaaatatatgatttttaataacacaatacccatgtatattcataattttgaaaagaagaaatatatgcatatacaaatttgaaagaaattatctcatgttgacattttgacttatcatttgctagtcaaattaccagtgcttttaattttctacctcctgcctttgttttataaagaatatttttattatgtctatagttatactaaactcagttcagttgaattgttatttaaatctatggaaaaaattttgctttgtccataaattgtatttatattagaaagttaaaataattaattataaaacatatatccaggtttttttatttgttccagtacataacagacctattacataatttgagtaaattttgtcttacagttatacaggcagttctctccttacacaattctgatatgcatgaatatcagttatcatagtttagttaaatgctaacagtcctccaacaacgtaactcaagtgttgggtaacattgaatattactgtgagtaattacataaacaaacattgctgctggctctgcagtccacaaattaccacataaaataacagatgcacattgtgatcagtgaccgatcacgtttatttttttcagtatctgttggtgattgcgcactacacatttatcattcagtttatttatagaagagaagcgtgtggttgtgttgcctccttgtgagtgataaacccgagtgacactttacaaacacagatattcaaaaaagaagaggaattggacagcaaagaggaaagcactgcaaagaaagaaaatacttgaagtaaaattcagattgaacctaagtggagtcatagaagaaatagtcactactgaggtttgagagattctgaatacgtagccagagctacttagtgaaggtgaacttaacataagtgagggaagtgcttgccacaaatagggtgaagatgtcctggaggaagtgacacccaaacacttcacattagaggaattctcacaggtacttcacaacactaaaagcataaaagttaaaatgttggaagctgattcaaacttagaaaggagcgtgacaattcaccaaggcatagaaaagaagtggccgggtgcggtggctcacgcctgtaatcccagcactttgggcggccgaggtgggcagaacacgaggtcaggagatcgagaccatgctggctaacagggtgaaaccccgtctctactaaaaatacaaaaaattagccaagcgtggtggcgggcgcctgtagtctcagctacttgggaggctgaggcgggagaatcgcttgaacccgtgaggcggagcttgcagtgggcagagatcatgccactgcactccagcctggggaacagagtgagactccatctcaaaaaaaaaaaaaaaaaaaaagatgcttgtgttcagtgtgataagttataggtgagatgaaggcaagcactgttcaaagtacttttagtgagtattttacaaaggactaaaacaacttctccaagtttttaatgttttaaattacagagtactaaataaatggtcatttttactggtttatttctttacatttataaccagcattggagagttgttaacatgttgaagttttacaaagtcttagagctatcataacctttcctgttgattattaagatcactttgcatgtttgtaacacaaaggttaaacacttgaggggatagatgtcgcattttccaagatgtgatgattacacgttgtatctctttttcaaaacatcccatgtagcctataaatacatacacctactacgtacccacaaaaattaaaaattaagaaaaaaaaagatcattttccatggttcaagtttgcatggtcacttttacaattccaccctaccatgcccgtaaatatgctatttctgacttacgaaatatttttcaaataaaatcattgctgacttttaactcactgatatgtgctttacttctggtgaaaggcctaacatatcaataaaatgaaagaaaatcacagctttattttctttactgttctgatattttttgttctagtgtgatcgctgcttgcctctttataatgacaagcctttccgccaaggtgatcaagtttacgctttcaattgtaaaccttgtcaatgcaacagccattccaaaagctgccattacaacatctctgtagacccatttccttttgagcacttcagagggggaggaggagtttgtgatgattgtgagcataacactacaggtaagtagcaaataaattcctgagttggtttggaggcctgtgtgcttctatctacaatgcatattattttaaattatgttattgctatcttatttaaggatgtactttcatacctttaagtttgaaaatcaaagctagttcaccaaatcttcctatttccaaatcactaggtagttttcagaaatagcactctagtcttaaactatatcttttcaggaaaaggattttgttgttgttgttttgttttgttttgttttttaaagagttcacaccatttgactaaaccacaaccatatttagaataactcgggaatgcttactttgaacacatatccttaaagtaagtttccttttgtcccctttattgtcctttatgtctggattctcatgtggagatggcattcattcagatttggcatggacactggtagtctgagaatactctttttgaaaatactaattaaatggagacgatgataatcaaagtcctgttctaaaactacaaagcctttgactagtcattgaaaaataccatccttattttgaaaggcaagaaatggccaacatctgaatttgtgaaatataatagcatatatctgatgggtttcaaagtggtactcttaagcatgaatccatttatcggctgattattgataacttaaatatcacaagatcttgggtaggtgctggggacatgaagatgaataagacaatgaattttctgtctttgggttattgtacagtgggaaagacagactattgaaaggaatgattacaaagttgtctgatgattgctaagatagggcaaggacagtaggagttaaccagttgaaagattaggatggtgaactaaggcttacaattagggaaacattttgtgcagtggcctagaggagggagaaaaatgacacgtttgaaaaaccataagatgggcaaatggctggtggtaagagatattaggaaggaaggcaggacaatatcatagaggactctggagccatgataaagcctttggcttttatctaaggtcaaggagatgacacttaagggttttatatgggaaaggggcataatgagttacttgttattaaaagatacacctggttataaagtaaaaaatggattggagaaggttagagtggttggggaaaactagttagtgaggtgctgcaatagtccaggtgagaaataatgtcagaatacatttcagatggtacggatagagagaaatggatccaagagatatttaggataaaaaagtgagtgttttgtgagcagagtgtaggcaagggaaggaaggagagccaagactgatacctaacattacattctagcttgagcagtaggctcaacattggtgccagccattgagatagaaaatacaggaggattgagatgagggaggagatggcaagttctgttgtggatatgttcactcggtttctaagagacataggagaaactcctgggggcagttggaaacacagttctgaagctctttccttcaaggaaatcctctcatgatgctttagagaagatcagaatcacttacacatgttagtgacaactatgcttatcatggtttataaatgtgtattactcctggtattatttagttcagattcctcttacctcctagactgtaagagagctttgtgaaagagatgcaatgggtattgtgtatttagtttactactgtattacacagcacttagcacagtatttggtacatagtaatcacgcgataaatattcattaattcataaataaaagagagatttctggattggagatatggatttgggagtcaacagcatatgtaaatggaaatagtctagaaatattataaatcaatttaatttttaactagctcaatagccaatatctatcagaatatgagttttcatattattgattattgattatttctgtagtcttcaaatattggagaaatttcaatattttttgagcaaagtacatcatgtttaaagggggaattgatagtcttgagttctacttcagcttatttcaattatcttatacactagtcacgttcactttaaaaattccttgtagtttaggttttttattacataatatagcaaaggaaatttgtaattataaattataaactatgggaattacctgatatatctaatatgtcaggctattctagtatttagtatgaaaagtacttggtatctctaaatataatgaatttctatttcaatctttgaaatgaaaaataatggccactaacataatcatttgtttttaattgtgttaactacagaataataaattatattaagagaagtctcccattttacatgattgagttctagaaaaatatttccaatactacatacctgcttgcttcttactgtataagtatcatctaccacatatgtagaaatttctcctgctgtattgagtttagataaagtgcctggccccagatataaagttttaagtttaggagcaaactctttccaaatgtatgggcccctataaagcacagctttttagaagtgtggtattatataacagatgggagtttaatgaagtaaagcacagtttgtaacaggttcattgtttcatatgctctggatcactaaattggcaggtagagatgaaaggtgcattaaaacggacgttccgaaaattatagaattccctcaaaggaatacagtctttaattttgaattatgcagctgattttaatgaattagaagtcataatgcataacctttccctgatgcaggaaggaactgtgagctgtgcaaggattactttttccgacaagttggtgcagatccttcggccatagatgtttgcaaaccctgtgactgtgatacagttggcactagaaatggtagcattctttgtgatcaggtgagtttttctgagtatttaaggtaaaggattactctgtctgccagaaacttatttggatgttattccactagtagaattgaagactgcatttgccaggaaatcctctatgtgcatttgcatttcaaagagatggttgttcgtgtgcaactttgagtatggacatgaaatatagcactagttcggtggtcctttgcatataaaaaggcttattttagttttaattttacaaatgtcaaaaaatcgaagggtaggggttctaagtaaattggggtatatgtcttggaattattggtgaattaatattaatacatgatataaataaacaagaatagtttctccaaaaattccatagaagatcatatagcaaaagtcacttacacttagggccaaatggaaattatgatagcctcgcttctcaatttcttagtctaactttccctcttaaaagtacaatggattttttataattttaaaactttctgtttacttacatcacaaatatcgatgtctagcctacatgcacacagattctaactaacctcagttcatgtatcctacctcaagcaggaaaacaggcttcttattgaagctgaagtttttcctgttctgataatactaataagtgaaaattgtgaaaatcggtaaaggagaaatttactttgaagaatcaattcaatgattgtattaattttaaacagttatatactctgttatgaataaataaggctaggagcataaaccacaatccagttatagaatatttgttaaaaagttatattgtgaacataatacacacaagacaaaatatctttctcctataattttgagaattcattaaaaattgctttcccaaataaaagacaaatataaaccaagacaaaatatggattcaaagaccttcagagtaaccatcatgtgtcaataagggggcattacatgcttcattagaaagctgaagagtagaaaaattattaataaagacaatttctactatttttattttataatattgagggactattttctcagaaagtcatactacagttttccatatattaattagtaaactctgactgtatctttagattatatttcatttttacacatccaccctgagttttcagcatggctatcttttgcttatcattcaaatattgatatatcatattttgagatatctttgctgaccacccaattacaaaacattctcaagtctttcatatcaccatgttactctcattacaggctctgtaaaattaatttatttgtttacttttcttcttctctctttccaacataaacagaacagtttcgatcatataaaaagcccccaataagtatttgtcacataaatgttgaatgaataaagagagattatctgagcactgatcttatagttagattgttattttaaacggtcattacaataatctgagcattatgtaaattttcacttgcagaacagtttttctccctgaaaatctaaggtcaagagctttgttatatagtataggaagactgtaaactatagttttacctcccagaatctcagttacgtgtctaacctacacgagttacagtgcatcagatttgtctctccatttcaccattcagatctacaagaaattgaaacctgatttttctgaactcaaacttctatttcaagtccgttttatagggatgctagacaaccttgggtggttctgtgcttgtaaataattaacaactgactaagaaaaaaaaaaggccaccataatcaatttcaatctaccagtgagatgtcactgaacatggatttcagaagaaatgtacttaatctgctcttatgagccagtgcagtgtactccagcatactactggctctagatttctttcttaacatcttataaagtggagctaattattggatggaattatgaaagactgtaccatttataagcaggatattagctgtagatagtgttattttttaagttggagaaatttttctctattcctagtttttctgagagtggtttttatgaatggtgttgaattttgtcagctgctatttctgcatcaattattatgatcatgtgatctttttttctttagtttgttagtgaagtagaatacattggttgcctttcaaatgttgaaccagcattgcatccctggaataaaaccacctttgtgtgtgtctttgtgtgtaattcttttcatatattgttaaattttatttgctaaaattttgctaaggattttacatctgtattcataagaaatattgctctatggttttgtttttataaattgtgtttgtttcattttgttattaggataatactctcgtaaaatgaattataaaatcttccttcctgttgtttttctataagaaatgcagaactggtgttaattactctttaaagtttaccccattctaatacatagtattctagtaaatacagtaccccatgtattagtccatttttgtactgctgggaagaaatacccaagacagagtaagttgtaaagaaaaataggtttttatttatttatttatttatttatttagagacagagtctcgctctgtcacccaggctggagtgcagtggctcaatcttggctcactgccacctccacctctggggttcaagctattctcctgcctcggcctcctgaacagctaggattgcagatgctcaccaccatgcctggctaatttttttcttttttttgtatttttagtagagacagagtttcaccatgttggctagactggtgtcaaatcccacccacctcagcctcccaaagtgctaggattacaggcatgagccaccacacctggccagaagaatagatttaatggacttacaattctacgtggctgggaaggcctcacaatcatggctgaaagcaaaggagaagcaaaggcatgtcttacatggcagcaggcaagagagaagtgccgagtgaggaacagggaaagccccttttgaaaccatcagatttcatgagaactaattcactatcattagaacagaatgggggaaactgcccccatgattcaattatctccacctggttcctcccacaacacatggggattatgggaactacaattcaagatgagatttgggttgggacacagccaaactcacacttggcccctcccaaatctcatgttctcaccattcaaaacaaaatcatgcccttccaagagtcccccacagtgttaactcattccagcattaactcaaaagttcaagtccaaagtctcatctgaggcaaggcatgtcccttctgcctacaagcctgtaaaagcaaaagcaagttagttacttcctagatacaatagcggtacaggcaatgggtaactacacacattccaaataggagaaattggccaaagcaaagggcctacagtccccatgcaagtctgaaacccaatggggcagtcattaaacctcaaagttaccaaatgatctcctttgactccatatcttacatccagggcatgctgatgcaagaggtagctcccacagccttgggcagctcggcccctgtggctttgctgggtacagccctccttctggctcctttcacaggctggcattgagtgtctgtggcttttccaggcacacgatgcaaggtgttggtggatctaccattctgaggtctggaggatggtggcccccttctcacagattcaccaggcagtaccccagtggggactctgtgtggggggtctgaccccacatttcccttccacactaccttagcagaggtacttcattcattagggctctgcccctgcagcacatcctctgcctggacatccaggcatttccatacatcctctgaaagctaggcggaagttcccaaacctcaattcttgtcttctgcacacctgcaggcccaacaccatgtggaagctgccaaggcttggagctgccattctctgatgcaatagtctgagctgtatgttgatcccttttagccatagctggagcagttgggacacggcaccaagtccctagactgcacacagtgggggggccctgggcccatgggaccattttttcctcctaggcctccaggcctgtgatgggaggggtgatgagacatgtcctggagacactttcccccattgtcttggtgattaacatttggcttcttgttagttatgcaaatttctgcagccaacttgaatttctctccggaaaatgtgttttgcttttctactgcattgtcagcctgcaaatttttcaaacttttatgctctgcttcctctttaacacttactacttagacatttcttccactagataccctaaatcatctctttcaagttcaaagctctgcagatctccaggggaggggcaaaatgccaccagcctctttgcatagcaagaatgacctttactccagttccccacaagttacttatctccagctgagaccacctcagcctggcctttattgtccatatcactatcagcattttggtcaaagccattcaacaagtctccaggaagttccaaactttcccacatctttctgtcttctgagccctccaatctctttcaaactttcccacattttcctaccttcttctgagccctcccaactgttccagcctctgcctgttacccagtcccaaagttgcttccacttttttgggtgtctttacagcagcgccccactacccagtactgatttattgtattagtccattctcactcaactataagaacaaacctgagactgggtaatttataaaggaaggatgttaattgacttatagttcctcagggcgggggaggcctcagtaaacttacaatcatggcagaaggggaaacaaacacatccttcttcacatggtgacagcaaggagaagtgccaagtgagggtgggggaaagttccttataaaaccatcagatcatgtgagaactcactatcagaagaataggatgggagaaactgcccctcatgattcaattatctccacctggttcctcccatgacatggggattatgggaactacaattcaagatgagatttgggtggggacacagcgaacacatattgctccagtaaaactatctcagatttctttggaaacagaaataatttattattaattcaaaattaaatactacatatatatgtacatatatgtgtgtatatatgtatatatatagagagagaaagacagagagagagatacaaggaaatgagagtcatattaacatcattaggaatttaatattactagaagacagttcagaataaccttaaaatcccaaaagaagacattttgaagaaaaacttgatactcagttctatccaagctatggcaccaacatgaggttaagattctttttgtacgagagatggtcaaaacattaccattcataaccccatattaaaatattcaatatgcaaagtgaaaaaggaatgtaagactggggacaacattaaacaaaggaaatgacaaacaattatgatccaaagaaataaatacataagtcaaaaaatattttcaaagtatccattggtctttatggtctgcaaggatagtttccttacatacatgtttagtaattcaattttatttaagatcaaatcacaattttttgtgatttgagataaacaaataacaagtagagggctaaaaatactatatccaaatatttcagtgagaaactggatgcttttttcctaagatcaaaagcaagataacaatatcccataacattgtactgaaagttgtagccaagaaaatgaaataaaagacattgagactggaaaaagagaagttatttgtatttgcatatgccattatcttatagatagaaaatcctaaggaattaattcaaaagtattaaaactaataaattcaggctgggcgcggtggctcatgcctgtaatcccagcactttgggaagccgaggcgggtggatcacgaggtcagcagatggagaccatcctggctaacatggtgaaaccccatctctattacaaatacaaaaacaaaattagctgggcatggtggtgggtgcctgtagtcccagctactggggaggctgaggtgggagaatggtgtgaacctgggaggtggagcttgcagtgagctgagatcatgccactgcactccagcctgggcgacagaacgagactacatctaacaacaacaacagaaaaaaacctaataaattcagcaaggttgcagagtacaatatcaatacacaaagatcaattatatttccatatatttgcactgaacaatctgaaaataaaattaagaaaacgtcttttaaaaatcaccaaaagattaaaatatttagaaaaacatttagtaaaagaagtgtaaaattatattctgaaaaccataaaacattgctgaaataaagaagaactaaataaatagaatgacacccaatgctcatgtatcagaagacttaatattattaaattaacaacactctccaattgatctacagatttagtgtaatctttgttaaatgcccaccttacttctttgcagacattgaccatatgatcctaaagtttgtatgaaattcatgggactcaaaaatgtccaagataaccttataaaaaaagagttggaaaactcacccttcccaatttcaaaatttactataatcaagacagcatggtactgggataaagatagacatagagacatattcactgaaatagaattgagaatttacaaataagccctcatatttatagtcaattgatttttgacaacagtgccaagacagttcagtggagaaagtgtagtcgttttaacaaatggtcctgggacaattgtgtttttatatgcaaaagaatgaacttggactcctaccccacctcacatataaacaaattaattcaaattaaacaaaatattgaatataaaagctaaaattataaaatcttgagaagaaaatgtagatgcaaatcttcatgtcctcggattagccagtggctttttagatatgacaccaaacgcctaagaaacagaagataaaatgtgtaagttggacttcattagaattaatatttcaaagcacaccaacaagaaagtgaaataaacaacccaaagaattagttgcaaagtatataataaatctgtaataatgaagaaaatatttgcacagcatatatctgataagaagcttgtctagtatatatgaagaacttgaagtgaataatcaaaagacaaataactcaattttaaaatgcgcaaataatctgaatagatatttctctaaggaagatataaaattaccagcaagcacataaaaagatttttgacattagtcatcagggaaatgcaaatcaaaactactgtgcaagcccacttcccaaccagtgggatgactgcaactcaaaaaaaaaaaaaaaaaaaaaacagacaaaaacaaaatttggtgaggatgtggagaaattggagtcttctcataggctgcctgtgagaatgtaaaatgtgcaccgactttggaaaatggcttagtgtttctcaaaatattaaagatggaattaccatataacccagaagtttcactcctctgtatgtatcatatatcctcataaaatcttattggtgaatgtcaatgccacattgtttgtaatagtcagaatgtccatcaactgctgaatgaatagataaaatgtagtataatcacacaatggaatattattttacattaaaaagaaagaaattactggtacctgctacaaaatgtgctcaagtctcagaaattagagtagggaaaggaagacggacgaagaatagagaaagcttgttttgttttgtttccaagtgcaaaaatctgttttaaaaatatatggaaggaaagacatgctttaaaatgttaacttttttggttttaaaaacatttttccttttatataaacttttttctctttccaaatctgctttatttataacttttatagtcagaaaaaaaggagaattttcattcaacctgatatatagccagagagaattacacataagaataggaatgtaaataagaatgatagaactgttttctgactttaaacccccacattgtttatctttaaatcacattcatatattatcttaatttttattattttctcatgctccaagtatagagacaaagtttatggagtatcgttacatgtggagatattgtgtcaagtctaccttacctaaataatgttataaaagatttcaaaaaatgtttccagacattgtcaataggataacagaacacacacttaaaaagttgtcaacagtgtcagaattataaactgcaaaattgaattcaaggacatttaaaaaattcatgcaatttcaatccttaataatattagggagcacacaaggaaattaggcagtagttcaagtctcattttgttataataacttaggaatgaagccagccccaaatggcctgagtgactgtgtcgtgcgctctatgttctggaagggaactttccctttggcacttgtcatttgaaactcaatccaatctcataagatatggcatgtttgccttattcttccataagaaatgttgtaattcttccttatgtgaatgccaaaatcttgagaggggcataaagtaatgctctgagtcactgaatcctaaaaatactgatgccacagtcaagacagagagaacatctaaagcacagtactaatattaataggagagaggaaaatgaagagtaataatgattattgaggaataactaacatggaatccttggatcccttgggttactatatgagtgtatattttatgtctgtataaattgagtaggatacaatttatgtctgtgtcatacaactgtaagtctgtgtatttttccttttttttttcttttgtctgtatttttgagggtgagagctttcagtactttcatcagatccaaaagggatacatgaaccaaaaaagatgataattatttcaccatggaaaagaagtctatcttatgaacaggctgggttattagttcaggtacatattatgtgagtttttcaggataccactgcacttccttcttgtttgcttgaacttaatgcatgaattacttgacatgcatcctgagttggaggttaactgtccttttccatttcctcatctagtgtgacttaagttcagatcaatcaaatagagtcccaggcctagatgatgcctcttctgtactttgacatatctggagaagggtctgtgaatccacacctaaagtgcatacatctagagatctcagtctgatcctgacccaaggtgggagtgagccgcttgtctccatcctttccctccactgaccccactcctccacatattttctggtagccccagagtccctgctatagccacctccacaggtgatggtgataaggtagggagaccggtgaaagtccctaacataagtccctagcatatggcctgactcatgtagaatgcattcaagaaatattgtctgagtgctttcttgcttgggacttttttcatccctgctaccttctctcccgtttactttgcttgttattgggttgagctgaggaagccatgggggttcagccactgtagtcaagatggtggtcatcagctagggtagtcctcaaacttttaatgcacatgtgactatcctaggtatctttttaaaagacagattctcattcaggaagtttggggttggggctcagattttacatgtgtaaaagttcccagatgatacaattgccgcctgtctgtgaaccactttttgataaccaaggagttagaacactgtatatcaaagatatgtagaccaaagaagctgaatgtagatgggggtaggggagttgtgagtgtgtactcacgagcacatgtatactcttggtcagttgtgggtttactttgctccatcctctgaatcccatcttaaaagcaaggattttccaagtcatccaaattaagttaggcttgaattgtgccctgggctctacctttaaaattagagtatatcacctaatagccatttttaaaaggaaataaaaacaacaaataagggaattaaaaagttgtgtgaaaaccaaaaatatagttgtaattatataaaaagagagaatagcagattgtaatgctcaataaagcatcaataggttactgtaatagcaacagaacagaaataaatgattaagagatatttaaaaatagattaataagaaaggaaactgaggttgaaatgaattagacgaaatggaaaggcatcagtgaaagaagcatttctaggtctgacctatggaagatggaataataaggaacagagaccctactcatgaaaattgattgttctggtgaagtgataattttcaaaacaatacatttaaaatttgaacagaatatactttctctgcataatgtaccatttttctgcagttcattaatggtttctcttctgttcagaattaggtatttgtcattaattaccataacatgtccaaaagtcatcaggtgaacttccctgaagtatattcttatattttgtatgactcaaatattaaagtgtacaaatagaaaaaataagtattgcataagtttccttagcttatgagaaacctgaccatgaatagtatgatccatggatattggatgtatacattgaggtggtgaaggatgtgaaaagaggagagttttcccagagcttcaatagagacagaaaggtcttggcacaagccacgtggtctctccttcagagaattagggaagtttagtagtaatatttctcatagagctggtaaattgagtaatatctcattattctgagattgtagaggatgagattcacaaagacaggaacaaaggtcctggggtataaatgggaaaagaagggaaaaattaatcttagctggataggaaggttagtattgagggagttatccaagaatcaaggttgtgacaaactgcctgaaagtaaaaatagatggagttgtaactgagatgaggtcttagcctccagtttatgttgagttccacatgtttgaatacatctgacatctttttgggaacaagctcatcacaagggcccaggtatacaaaattggccaaataccaatacctcaggcatttaaggctagattcaatagccctaaatagccataatagcactagcagaagcattaggtagtgtctggatattggaagaactgatttaactagtaagtgcaagataatgtgatacaaggcccattgccttgctaccaatagcaatgtagttagaataggctaaacagatgtaacaaacccccaaatatctagtggccaaaacaatatacaggctcatttgttgctcatataacctctccaagacagctgttcctacctccttgttggatcttctctttgtgacaattcagggacacatgctccttccattgcctggatatgcctttaactagggaaggaaaagacaatgtggaaaacaacttccacttttaaaatgctttggtccaaaagaggtgtgtgtcgcttctgctatcattgccattgatgatagctagtcacattgctaactagttatatagaaggctgaagacatgtagtctctagctgggtaaccactttgcagctacatttgtgtactattgaagactagggagaatgagtcttgatggggagcatgtcatctctgcttaatactcatgcaacagaaggtagcccaagagcgaaaggggcattctcttcttttctacacacagaacaggataacttctgtttaatgaggacctctgagaatagagtaccccatgagcatctcaggggtgccaagccattaatattggtgggactacctgcttggaggtggaccctgtaatattggtagatgcacctgtgaaagcacatatcatagcagcatgtatcagcaagagagaattggacataggaggagaaacagcttgtgtgcaaggttaaaagatttgttcatgagcacatgtgagagagaagccccaggaacaaggaaatgagaaaacaattactgcctcctacatgttcccagaggagggggctgggagagcaattaagcataaagagcattaattgcatagaagatgctgagggatcatagatttgaaagcaatttcaaaatatgagtattttaagacttttagcaagaacagacaccataggctgtatatagtttcctggagttatgattaaaggatgaaaacaacttttgtttagatatgtaggtaggtaagtaggtagatatagatagatatgagaatagtaagtttgtttaaacaaattattcattacatcatagtgacccttagtgctttttgatgatactgactgatatggtttggctgtgtccctacccaaatctcatctaatagctcccataattcccacgtgttgtgggagcaacctggtgggagatgattgaatcatgggggcaggtctttcctgtgctgttcttgtgataatgaatgagtctcatgagatctgatggttttaaaaatgggagtttacctgcacaagctttctctgcctgctgccatccatgtaagaggtgacttgctcctccttgccttctgccatgattgtgaggcctccccagccatatggaactgtaagtccaacaaacccccttcttttgtaaattgcccagtctcaggtatgtctttatcaccagcgtgaaaacagacgagtacactggcttattgaggaacagaatataatcagcctccttcattcctcactcactaaaccaatgtgctgatcatttctagaggcaaggacactccaagaatcaagaaagagccgatgatgaggctttctattattctcctggactggacgttgtctcagcttctgctgggccatagaaccctgcctctaccttgacttacccacatgttgttttggtgccaagtattgagtgctgcattttggggtgtacaagacagattggcatattgctaaaaatgtgcgaggacagaaatgacagaaactagtctgtaagattctcataggttccacttgtcttgcactcgtcatgtacaaaaatatgccaagcattgtagttcattaattcagtccttaccaaagctggtaaagcagttattaatttatccactgtaaagttgaggacatccagccttttggaaattaaataactcctccaatatcacacaagtaataaggaggttgtgcagaaattgaaaacttgtgaatttccaaagctcatgcccagctggaggttagagacatagggttcctaccaaaaatgtgttcctagcactcagcatagtgttcagcacttaagaggaaacctacagcagattgctaaactgggtatttacttacactatccaaaagtaggaaggaaacatacccatttgtttgtgaattattgtatcaaatcctattaatttcatcctaaatattaaataaaattcctaaataggaaatagcaatgttcatataaagaagcagcaaattaatttattggaatcgacacattcctcaaatggagatttggttgatattagagacttaatgtacctcccttagtgcttaatgtataacagagattccacttatcttacctatataacctaagaaatttgaatattttataaagttactttttagaaaacctgatttatttgttttccttgtcatctcagatggataccttcctctcaaaatctatttggaatttatattttcaagtattcaattaactaacatattaagcaggcattctcctgtgtaagttcctagcaacttttaccacttgtactaaaataaaacagatagttaagccaaatgagttaacttttctgaaagtgtatctttatacaacattaactatagacatggaaaatacatttattcacgttagaaataaatgcttctgtgagatctttcattttgataaagtcaaaacaccatcttattaataactactatattaattttgcagcaaattacaataagaccacactgtatagttgtgccattcagatgacatttatgaaatgctctaatttaacatggtgacatatattacctgcatcttttacacattatagcttatatcctctgagcgaaatagacctaaaccatccaaaaaaaaagagagagagagagagaataatgcaatgggaaattatacccctttgagaactagaaggactataattacattgcttcctcttaaaaccattcaaatatgtaaccattgctgggaacagcagtatgtggggaacctctttacactctttctgtcttgaacactcaaaagattgagaaaaaaatattcctttcctactatagttttatttgagcatgcttcagaattttacctttttgcacactccttagagattatcgtggggaagtttagaaagcagtttcttggaaatgccttttggaggggaagaggagctataaaaatataccagcctgacaaatgacaggcattgtagactggaaaagaaaagacatcttggttttacaccaatgtagaagcttttctttgcaaatgagtatttttgacagctgagcaagatgataaacagaagtatcacaaaacacttaaatggaaacaagtattatgatgtactttattcacctggcattctccaattcatgacatttatatgtggcagaacccactgcagattcatttatttatttttgaagtggaatgagttccttacgaaggtagcctgttacattaatgtggacttttcttctctagatgcagaagcttaaggaaaaaagttattgtatctgtactataaataagtggtaagtctcagaatccacatcttagggctgagaaggctcctagcaagtacaatatactgtataaatatagacaaataaatatagatatagattttttgtgtaagcaccggcagtgttgcaaatgattagatatttcataaatgccttttctaaaaaggtattgctgaaaccagtctatttctagaacttatattcagatgtttagaggtataaatgcttcaatattggctaagcttagaaaggctatgtttctctgaggctcagtgatagacataccaacaatttgatgagatgcatgactaagaagaaaaagagagtaagactgagtccctgtgaattgattgacttggtgcagtggcagagtaggtagcaagtattaaagcaatagttcttaaatgttagtgttcataagaatcatcaacagaactttttaaaaatgaagattcctaggttttaactttagcgacttttaattctttaggtctggtatatttggttgtgggaaatcaaaagactcaacttcggaatacactgaacagttgctgactatagatttgtatattcaaaattttttggtatttaaaaatggtatgtatggtttattgagtcaaatattttaaaaactatgaatgtgtgctggtttgtttttttttttttttctggattggaggacaatttggggtaagcattctctatttaacaagtcataattaactccctgccaaaactaagtagaaattgtgatttctataactcctatatttgataatatctcctaaaaatatttcagtgatatagcatttaattgcaaataattcatctagtcaccaaacaaatgtagggacgttcctatataccaggcactgtgcatatcaaggtgtatattacagtgaataacagaaacactcacgaagtgttcaattgaatttaaccttgaaatgtattatttattattattatgtttaaataaactatgtgaggtttttttttcattgccaatgagaaacccaccctaacttcagaatttttatctttaagtatatcctattttaaccacccttacccatccactctcaatgatttctcctcagtgtggggccttgccgtggaagtgtgccctggtcagtgagttttgagagtccgtggaagctagattgccctcggctcttcagttcccactgcagaactcttgcagtcactggctattggatcagcagaacctcttctattttcagtcgcccattttcaaattggctcactgaactttaggttctccagttttcaggtctttcaaaagtccgacacccctttactatcatctgctttctcctacacaggggctaatgccatgcaggttttgtgactgctggtggtgtgttcctacctgctttttttgggaggcttctgggcacagctggtcacctagtttcattataatcatttttaatggctttgctgttgttgtgttgctgtttagttctgtcagcttttatcctgggatttagagagacccaagagttctgtggccacataaccattgatcctgattcccctggagtctcttttgacttttactgcctaatttaagctgaacatatgaaatacatgaaaaaactgaaagctcaagctcgtttgttgtttgtcttcctaggttatggtttccatttctccctctttctcaacctattttgccaatcaatgtctatccttccttcactttttgcctactcactacaatattcaattacacaaacataatttttcctctgcccaccccagcaccagcatttttctgggagtttaagtctcttatgaatctgggaagaaaggaactaaaaatgagcagggatgaatagcaaaatgagtgagtcaacgagtagcaggcaggacattagagtgaagctgttttcttacccagaagactgatgatgggaaaggaaaaaagaacaattcaaaattagtagaagaaaagaaataattaataaaacatgagtggatattaatcaaatagaaattggacaaaaaatagtgaaaatgaacaaacgcaatagtttgtcctttgaaaaggttaataaagttgatgagcagaaaacacaaagtaccaacatcaaaaacacaaattaccaacatcagaaatttaaaaaagagacatcaatgtcgttgcacattttataaacattaaaaaattacagttttatgaacagctctgctaataaatctgatgtcctgaatgaaatgaacaaatgaacacaaaaccaacaacaaaaaatagaaatagcctcacatatattaaagacatttaattcatatctaaaaacctttcaacaaggaaaatctcagtcccaaatggcttcactaatgaatttgccactaacataaaggaataaataatattagtcctacacaaactctttcagaaaaccaaggaagggcatatatttctcagctcattttgtgagggctacctaactttaatcccataacctaacaaagcactaaaagaaaagcccattagaatattccatatgaacatagatgtaaaataccttaacagcatattagcaaatggaatcctgcaatatataatagggtaatgcatcatagctgattggatttctcccaggaatgcaaagttagtttaacatctgaaaatcagttaatgtagtaagccacataaatagaatacaaaagaattcccaggtaatcatctcaatagatcaaaaaactttgaaaaagaattcaaaacactttcatgataaataccctctgcctactaggaatacaagagaacttcctcaaactgaaaagggcatctgcaaaaaccctatagctaatattatgttaacaataaatgttaaattttttaccactacatcaggaacaaagcaaggaggtttgctcttataacttctactaaaaattgtaacagaagtctaaagtaggacaaaatgaaaaaacaaaaagccatgaatatcaagaaagaagtaagactattattatttgcagaaaatatgccactgtatagacagtgggagtataaaaattgcttggcaagcatcaagtcccccacatacaatcccctcctcacactactctccttcgtaaagccatgaaaaaccgctttatattctaagtaaggacgggatgtttgatgtgcaaatgcagctgtaagataaatccctgagcaacatttttggccaccctgcccttcctatagaaagtctggggctgtcactgaggtagggttagtaatggtatgtgagactggagagatatgtggaaaccacctcatggtatttggtcttcactagttaggcaatagggagctattgaatatttctgagcacaggagtgacacagaggtgtaccaagtaggtaagaggcagtggaaacaatctacctcagtggggaagagtattgtatcacaaaatttgtttagaattgctagtacttggtgataattaaaagcaaaacaattttaactgaatcttattattttaattttacttacagaaagtgcatcctcttttgtgtacccaggtgtttcattctcaccaccttaccgtaggattattatcatcagaattaaagtagatgaggcaaggcacagtggctcatgcctgtaatcctagcactttgggaggctgaggcgagaggactgcttaaggccaagagtttgagtttatggtaagctatgttcgtgccactgcactccagcctaggcagcagagtgagaccctgtctcttaaaaaaaaaaaaaaattggaatgaatgaaaattaattgatagcagtttattaaatggattagggagaggaacagactggtagatatcattcagtatacaatagctggttagtgatggcaattctgaaagaagaagtggtagaaactgggaggtgttgctagtgtagtatgacctttcaaaactcacagagtgcatagcttgtggatgtatagaacaatgtgaaagaataaattctccagaaaggaagaagaggagttagagattttataaaagagaagtctatgatgttctctaggaaagaaaagaattttctgaagaatatatgcattgattaaatgatttccttttgccctcatttatatttattttctgttcaaatgaaacacttaaactaacactcaatttccgggacagatttcctgttcttacattcttcaatttgctttttaaatttttactttgtttagcaatatcaacattgcctcattggcttttagtgagtttcttgagaagatgtaatctatagaacattagttcttctctcccaccagacagatgagtgcatagaaagacatatagttatactgctgctgttttaaaagtgttgcttcaaattacctaaaatatagtgactattagataatcactgataaaaactgtgttcatctaatttattcatcttgaaatcatgcttcatatttcctttaagcacaaaatagttatgttcacacatgcacaataaatcatatatggattacttgatgccttgaattcaccctcatagaattttatctcctaatgtaaagaaaactgactggggtaattattgcaggatcttactcttttctgttgtcagtaaccttcccaccaaactcattgtgacaattgtcacccggttgactgtgcatatccaccattgctccagagcctaggccagcagacttttgctgcatggtccaaaatggtgaggtcctgggtgtgatcacaaggcaatatgcagcaaacattagtgaccatcagtgctaacaaagaaacttacaaagtaacaacttgaccacttggccaattcttccactgtgttttcagctcttcacaggtgtaggccatgccttaaacttaattgagtctagcactcttcctgttactattattatatttgtagcttatgataagcagagtgaatttaacataggggttatgatcatgcatttgagagttgggccacttagtaactgtattagtccgttttcacactgctgataaagacatacctgagactgggtaatttatacaggaaaaatttatacaggacttacagttccacatggctggggaggcctcacgatcatggcagaaggcaaagaggagtaagtcacatcttgtatgggtggcagcaagcaaagagagagcttgtgcaggggaactcttgtttttaaaaccatcagatctcgtgagatttattcactatcatgagaacagcacaagaaagacctgctcccatgattcaattatttcccactgggtctccccccacaacacataggaattcaagatgagatttgggtgaggacacagccaaaccctattggtaactgcaccacctttaataagtaatttgatctttctaaggtttaaattcttcttctgtcaaatgaagattcatgtattttcacaaataataaaatgacgaaaattcctgccactatggagcttacattgtaaagtgatttggggagttggaagagaaagaacaatcaataaatataaaaataagtaagtttatttactaagttaaatgctataggagaaaactagacaaagtaaaatgccttgagagtaccatattaaggaaaggaattgcagttttggaaatgtagccaagagacttttaattgaaaagatggcatttcacttgagacctgaaggagatgaaggagttagtcatgtggaaatctggaagaagagacctaggcagaggcagcagcctatgcaaacaccataaggtggaagcacccctgatgtattcagaaaaggggctgtatagctgaagtgagcagaagaaagagtaggaatgtcccaagcctacgggatccttgtgcaagctgcaaataattggtcctttcactttgcaagtactgccccacatccatcaaatactttagaaggtttgaaaaaagtttgactatcaatcacttgatgaattttcctgcccactatttgctctataccagtgtgaaatgtacagagtaatacttccacttcatctttaccgagcacttactatgttccagagatgatgctaaacatgtttacattaataatctcagttaatcctgacaacagacctatgaggtagatattattatgctcattttattgataaatacgtgaagacttcagtagatttaagttgttcagagtatagttaattctgtggctagtaattgtggcacataatcctaatgttccaggaatttatatcatttagttgaggagacactcctcaactcctgtctcaggtgacaggagtaagtgaaattctaaggcacaatatagcatggtgcataagcaggcaggactgcagccacagaaccctcaattttaattcaggctaagtcacttactttcccttttatgttagagacgtctgttagtttttctacaggaagtataatacctcacagggtaatttattcacaaatacgaaaacatgtataaaacatcatagcagtctgcctgcaatatcgtaagtgttcaaaagggttgtggatattattattgttgttgtaagctaaggaacgctagaaaaacatcaaagattcaattactcaaaataacttttgctgagcatctactacatgtaaaatatgtatactgtgggatcaatggatgatgtaaaggtgcaaaaggttctggcccttggggagtgtatggtacactgggaagttatattttcagacaagacataataattctaatacaagctagaccttaaggaattgaatgacagaggtaacaagaaaatgctgtaaaatggctgaggagagaaaaatcctctaatttgggaggagctcagtattgacaaaggctagaaatgggtagagaacactttcccaaaagagatgtcgtggtgcctggtgagacaggctgtgaacttgacttctcccatccgttccattattaatgtgtgtctctgtgctctagcattcatttcatcttgtggacatgctattgtttccatttaaaaactctcttgatcacaatttcttctgtggcgatggtctcatgtcctgctctcctttttggcaaaactccttaaaagacttgtctaggctcatgcctccaaatcctattctgctattatttcctggaaatatatctgtcaggccttcactctcatcattactttgcaacttttcttgttaaggtctccaaggacctctgtctttttaaacaaagctaaattctgtcttcattgtatttgacatacaagcaggatttgacacagttgatcactctcttttcatttagaggactccacattctccgggttttcctcccatatccctgactatttcttctgtatcctttttctgtgccctcctcttacctttgaacacttattgttggagtgctctggaactctctttagaggactttcctgtatctacgctcacgcccttggtgatattttacttcaaataccaattatacacagacaatactcaaatgaatttcacaatcatatttccaattaaacacttaacatgttttatatatatatataaaatattatttgaatttaattatctttatcttcacatcaatacataataatctatcagcaaatcatgttggttctattttcaaaaatatccatagtctttcattcttcctagattcaataattcctttgcttgtctatttagttttctatatgtcattaatcttcctcatgctgacgtctttgctacatgaatatatacatatatatggtacacatacatatatattttatgcacacacacatacatatttatgctcaaggacctcctgccctgctatcagcctagagcttttcatatacctctacatcctcatttcctgaatcccatgccttccattcttgttgctgttgtctgtttactttctttttgctggaactatattactcaatagcttcctgatataggaagttaaagttttgaatccttgcaaatccagaaaatgtttgtattctttctttacaggcaaccgataatataacttagcatagaattctggattagaaataactttactcataatttggaaggtaccattcttagctttttagtttactataatgttgcagaatactgcagtgatattctgtattttctatgtgacttattttattggtctctggaaatttttgtttcctttttatttttggaatttgaatgcttcatgagattgcaccttgatctgggtttttccaccagcatgtggtgagccttttttttaactttttaatattttatttttaatcaatcaacacataatatttatacctattatgggatacagagagatatttcaatacatatgtaaaatgtgtgagtatcaaatcagtgtaattagcaaatccattaccaccaacctgtatcatttctttgtgttgggaacattcaaaatcctttcttctagctatttgaaaacatataataaattgttgttaactatagtcaccatacagtactataaaacacaggaatttattcttcttacctatctgtgattttgtatctgttaaccagcctctccctatccccttctccctgctatccttccaagactccagtaaccactattcgaccttctactttcatgagatcaactggtttagcttccacatatgagtcagaacaggtaatatttatctttctgtgccaggcttatttcacttaacataatgtcttccgggctaaacataatgccctctaggctaatccatgttgcttcaaaagacagagttttattccttttcatggctgaatagtatttcattatatatttatatatgtgatatatgatatatatatatatatcaaattttctttatctattcctttgctaatgagcacttaggttgattctatatcttagctattgtaaatagtactgcaataaacatgggagtgcagatatctcttcaacgtactgatttcaaaacgtctggatatatgtacccagtagtgggattgctgaatcatatggtagttctctttttagtttttttaagtgaccttcatacttttttccataatggtatgctaatttacattcctaccaacagtgtataagaattcccttttctctgcatccttgtaagcatttgttattttttgtcatttttataacatattttaactgggaaaagataatattgtggcttttgtttgcatttgtctgatgattagcaatgttgagcattttttcgtgtacttgttggctatttgtatgtcttcttttgagaaatgtctgtccagaccatttgcacctgttttaattggattatttggggccattgagttgattttcttatatattctaggtattaaacatttcttggatgaataccttgcaagtatttttccattctgtaggtcgtctctccactttgttggtagtttcttttgctgcgaaagggcattttagtttgatgtaattccatttgcccagaccaatgtcctgaagcacgtctcctaggtttacttctagtattttcatagttttgggtcttacgttgaagagtttagtccattttgagtggatttttgtatatggtgagagacgggggtctattttcattcatttgcacatggatagccagtttccccagcaccatttattgaagaggatgtccttttcccactctttgtttttggtgactttgttgaaaacccgttggcagtaaataggtggatttatttctgggttctctattctgttccattggtttctgtgtctgttttacgacagtatcatgctgtatagctttgtagtaaattttgcagttaagtagtatgatatcctcagtcttgctctttttgaacaggtgactttgtctcaagattgatttgtctagctcagtggggtggctcacgcctgtaatcccagcactttgggaggctgagttggacagatcacttgaagtcaggagttcgagaccagcctgaccaacatggcgaaagactgtctctactaaaaattcaaaaattagcagagcatggtggcgggcacctgtaatctcagctactcaggaggctgaggcaggagaactacttgaacccaggaggtggaggttgcagtgagccaagactgtgccattgcactccagcctgggtgacagagagagaccccacctcaaaaaaaaaaaaattgctttgtctattctgggtctttatggttccatgggaatttaaagaattttttcttctatttctgtgaagaatatcattagtattttgataggaatcatattgaatctgtagattgcttttgataatacagtcatttttataatattagttcctctaatccatgatcatgggatgcctttccattttcttatgtgtcctctttaatttctattataagttttatagttttccttgtacagaacttttaccctttggttacatttattcctcagtatttttgtttttttagctatcgtaagtgagatttcatttttacctagtttgtgcttgttgtataggaatgctactaatttttatatattgatttgatatcctgcaactttattcgtttagtttatcacttctaagagttttttggtggagtgcttagtttttattacatataagatcctgtcatctgtaaaccagaactagttgacttcctcctctccaatttgtattcctgttatttctgtctcttgcctaattgctctggctaggaatttctagttctaggttgaataaagagtagtgaaagtgggcatcaccatcatgttccagttcctagaagaaaagttttcaccttttctccgtttaataagatgttggttgtaggtttgtcatatatggcctttattattgaggtacatttcttccatactaatttgctgacagtttttagcataaagggatgttgaatttcatcaaatgctgtttctgtcttttgagatggtcatatggtttgtccttcattctgttgatatacttttatttatcccatttattcaatttgctcatattgaatcattcctacatccttggtataaatcacacttgatcctggtatgtaatatttttgatgtgctgttggattcggtctgccagtattttattgatgatctttgcaactatggtcatcaggaatattggcctgtagtttttgctgttgcatatttggttttgctatcagggtaatgctggccttataaaattagtttagaagaatttcctctccttcaattttttggaatagtttaagaaaaaatggtattagttcttctattaaagtttggtagatttcagcagtgaagccattgatcctggacttttctttgttgggagactcttaattactgaatcaatctcattacttgtgagtgttctgttcagtgttctattcctccttggttcaattttggccagttgtatgtatccacaaatttatccatttcttctaggtttttcaatttgttggcatatagttattcataatagtctccaatgatcaactgtatttttgtggtttcagttgtagtgtctcctttttcatttctgattttatttgagtcttttttctttttttctcagtctagctaatggtttgtcaatattatctttcaaaatatcaactttttgttttgttgagcttttgtattgtttttggtctcaattttatatccttcttctctgatcttttttatttctatattgtgccttgcagaggacctttctagttaaatacatttgggaacttttgagcttcctggatctgggtatctatgtctgtcccaagacttaggaagttttaagttagtatttcattaataagtttttattaccctttttgtcatcttgtctttctaagctcccacagtatgaatagctgtttgcttaatggtgtcccacaagtcctgtaggctttctttattctttcttattctgttttctttttctttctgtctgcttgagttatttcaatagacctgtctttgagttcataaatcatttttttctgcttgatctagcctgttgtcaaaactcttgattgtatttttatttcattaactaaattgctcagctccaatatttctgtttggttcatttttatgataccaatttcttgttgaatttctgatttagatcatgaattcttttcctgatttttttcagttgcatatctgtattttcttctatcttgctgagtttccttaacatcattattttgaactccttttctggcattttgaaaatctcttttactttggggtctgttactagaggattattgtgttcctttggtagtgtcatgttttcttgctttttcatgtttcttgtgttcctacattgatacctgcacatctggtaaagtaattgcttcttttaatgttatggactagcgcttatagggaaagatttactcctgtagataagttctagagtgttaagtagagggtgataacttgggtcctgagtgggcacagtagtgtagtctctgtgaagtttcttcaactgtaatccatgtcagtaatgtttgtgaatgcttcactgacctaacctgtgggagtttgtggcagcagtgacatgactttactggaatcaggcttattgagtgagttatcaggatggaggcatgtttgtgcatgtgatgggtcacctagcttaggaactggcttgctttgggtgaagccgtgggctgtttctcaggccgggggcatgagtgttcagtggatcagctggttctggaactggttcaccaggagtgaggctgttgggtcgtttctcagtttaggggcataggcacatgttggtttgccagccattaagccttttaaaactatggtttcatgtctggaaaatgtgtattttatactaattctttattaacttattcctttaattttttttccttttggtgtatttctgaaaatttgttttcatctcattattattgttagcctttctgatgtattttcttatctttctcttctaatcttttagttgagatttttttccagcctttttttttttttttggatatagaatcttagtatattgtctaggctggactcaaactcctgggctctaacaatacttctacctaagcctcctgagtagctgggactacaagcacatgccactatgcctggctgtatatttttaatatttaagaattctttctttcaccaattgtttattcttttaggcttttttttgtttctatattttttaatgaatgcaacttttatcttctggggataacagagatattttattaaattgttattagttgatgatttcttccatctctaattccctgcattgtttgtttcctcatctggattatcatttttcatcctcctcctttatttttgtttctgtcattcacattgtatattttgcacatttgatgaattttgccatctgctttattctgtagagaaatggtaaaacatttccaaaatggcctttactcatgtttatgagcagcaatacagctttactttgcagaggttaaaagctcaaatattagttctagagttcttatctttgtagtatttttctgccagtttcctctttatggaaaataactctggctcccggctttctttaaactgtgtagaaggggagttgtggtggtaaaggggagaggcagtgtatacagactttcacttaatcctttcatgtctaccttgtgcctcttccaataacaagttgttgatgttccaatataatggagctggttaatttcaattattcttgacaataagactgatgtcactgtggagtaggattagtttggctggctgagtggggttgaaaaggggacctgaaaatctaaatactttctatgtggaatacctctaattcatgattctcaaccttggcactatggctattctgggctgggtaatttgttgtgagggatggatatgtgcattgcaggatgtttagcagaatccctggctacatatcagtatactacatgccagtagaactcctcccctcactgggacaaccagaaagttcctctggggacaaaatcttccttagctgagaaccattgtttaactttagacctgtgtgtgtcctcttacttctctcaatgtttcattatcttcaagtcttaaggctctcaaagattctataggaaaaatcagttttcatgttttaggaatccaattcagctagcactcaagctgtaacttctctgattattcaagaatgttgtcaatatttatttctatttcttaatttcattttctgtcttcaaaatttttgtaaaatgtatttcttccctattgatttctctgctggcctcattaaaattatgggttatattttttaaaattcctatttttttaattgaagtatcaagaaaaagaggaaaaggcacatgcttgatctgaactttatcaaaaattggtaattgttttcatctcttactattaactcttttttaaatcgatcctcttgctttaggaatccaaatcagcctgcactcgtactgcagtttctctgattagtcaagaacgttgccaatatttatttatatttcttcatttcatttttcgtctttgaaatttttgaaaaatatatttctccattattgttttctctgctggtctcattaaaattatgggttttacttgttaaaattgctgttattttaaagtagtgagaaaaagaggaaaatacatgtgcttaatctaaattttaccaaaaattttatattttagtaaatgtattcagatgcatatttttctgacaatgggcagtcttagttaacacctgtatcctttttcttgagcaagaaaataaatttattataatttttacttattctgccctagtattcctcatggataaatcgtgtcttaattttattaatctttgaatgcatcaattctaataagttggatcctttgtcagaaagcagaatgtgtacaatatacttatcccttagttttgtcttcctgggaactggctcttgatcacaataggatatatacctacagatcagcttcattataatttaatttactgtatttggcagcaacatcttctagtggtaacctagaccgagatgaaatattccatttcaattgacagttataaagctacagaccatagatttcagttatttgagtagttactacattaaaacacatctttttttcccttcctttgctcccaaccacatgtgcagcaaccagtatgtttctaaattttgctcctgtttataatgctatttcttaagcttctaaacatcgcagtgtgcatttcacctctgctaatctccatccaaattctgctatgttttggagtttgtaagaaagtgtagtgctgatgaggggattgaagtttcaggattccaattttggctgcttaacaggaacagttgaaggatggcatgaggtttttgatccatggttttccatttccctggtatagtaagcataggtatcactgccaaacttctttggagctctatgttatttgggttgagagcttggagctatgttaaacagctgaataaatgtttcccaatgcagctctgtctatgatgcagctcctgaaaattctctctgaatgttgtcaactagttttctcttaaattgagtttatagttgttttgtcaggtccaaatgtctttttgagactttactttgactgaacattgtgatagaatttatcctcctgcttgaaatgataaaaatatggacaaaatgtattaaataattgtttgctagatgttggacatcaggcaatgaggacaatgtttgctgagaaataggaaataaattatgtgaatcttacaattgacccggattactgcttacagagtatttctagaccacgacttagggagagaaatcccagatggagctcagagagttctccaaattgaagagatatagccaagtgtttcaggaattcaaagtagttagagtttgcagagagcagatagaggaacacagagataatttcacagatctacagagcatcttccttaagaattcactttactacggttcactgcatgtatgaggctgcagaaagcacaactttcaattattaaaagtaacaataattaacactcatgtaatgctgggtatgtgcctatttccactagctgaactggcgagaaaatttatgattcgtgggatatttgataagagtacacaaaagggtctagcctcaacagtggagaatagccctaggctgataactacttcaataccacctaataaatcttaagagcaagactcaaaaggaactgtttccaagtaatttaactgcatccaagaacaaaacacaaatatatttgtaagaacactgaaatatgtagtacctaacaagaaaaaattcacagtctctggcaccaaatcaaagattatcaggcatgtaaagaagcaggaaagtacaacttataatgaggatgtaaatgcatcaatcaaaattgatccagaattgtgagaaatgttagaattatcaggccagtatgttgaaacagatattacaactctacatagtttaaaagctacataaaaatatggaaggtactaaataaccccacagatcaaaattccagagaaaaacctacactgtatggaatgaaaatacactggatataattgattatacattaaacataaaacatttatgttatatataaaaaattagtgaacttgaagtcatagcaatataacctatccaaaatgaaacagagttgaaagagcatttgtaaaaatgaaaacagcatttgtgagctgtgggacaacttttagaggcttggtatatgtgtaattggagtccctaaaggaatggtggggtggaggtgggaatataaaaaatattcaaataatttatggctgaaaaattccaagtacagtacactgaaaaccataaagccacaaacccatgaatctcaagaaaactaaaaaataagtaacatgaaggaaatcacaaaaggcatattataattgaattgctcaaagctagtgataaatttttaatgataaaataaaatactacagcagccagaggaaaaagacgtgttaaatacaaaggcaaaacagtaagaatgacaacagatttcctatccaaaataatgcaaagaagaagacagtggggcaacattcttataactatgaaagaaaataaatagtgcacttatgattctatatctagtaaagatatctaagatgaaggtgaaataaaaactatttgcaatacatataatgaaagagttcatcacacagaaacctatactataagacacattaaaaagaagtccttcagtaggaaataaaatggtatcatatggaaatatggatctgcacaaagaaacaaagagcacccaaaatggcaactgcattggtaaatacggagggtatttttctaatgatttaattttctttaaatatagttgacagtttaaaaaataataataatatagtaaaagttttataacatgtgtaagtaaaatgtttggcagtaataacacaataattaagagggggaaaaggaagtacccttgacccttgaacgacatgggagttaggggcactgattccctgcacagtcaaaaattcaagtttaattttgactctccaaaagcttaactactaatggcctaccattgaccaaaaaccttactgataacatgaacagtcaattaacatttattttgtatatattatttactgtattcttaccataaagtaatctagagaaaagagaatctttaggacaatcataagaaagagaaaatgtatttactatttgttaagtgaaagtggatcataaagatctttgtcctctttatcttcactttgagtaagatgaggaggaggaataagaggaagaggagagattggtcttgtggcctcatggctggcagaggtggaagaagattcttttataagtagactcatgcagtgataacccatgttgttcaagggacaattgtataccgttgtaagatccttatactctatttgaagtagtctgtcacttaaagctaggctgtgataaagatgtaggataaaaaccactaaaatcataaaacaaagagttataactaataaaccaacatggagataatttgaatcataaagaaatataaaataacacaaaacaggcaaaaaaaaaaaaaaggaaaaaagaaatcccaagcagatgggacaaataggaaatatcaagataatagatttaaacataatcatatcaataataatgctaaatttacatattctaaatactccacttaaaatatacagattggaagattggttaaaaaaggaaaaagtacaacttaactatatgctgcttacagaaaagatatttaagtataagacacaactaggttaaaagtaaatgttggaaaagataaatcttgtgaacactaatcataagaaatctagggtgactttattaatatgagaaaacatgaatttttagaaattttgtccaagataaaatattgcccaggatgaagaaagtaatttcattttgcaaaaggagtcattttgtcaataggacataacaattcttaatatttctgtaccaacagcagagcttcaaaatgcacagagcaaaaactaacgtaactgaaggagaaagtaaaatccacatttgtcggcaaaaatttcaatacccttctctcaataattaatagaacaaactgacaggaaataagtaaatctatagattagaacaacactgtcaaccaacttgacccaatggccagttatggaacattcaacccaacagagcagcaaactacacctacttttcaggcctacacaaaacatctaccaaaataaatcaaattctgaaccataacacaagcctcaatagatttaaaagaattcaaatcatataaagtacattatggggctgcagttaaattaaattagaaatcaataacaaaataacctggaattactctaaatatttggaaactaactaacaaaattctaaataatccaagattagaagaggaaacccaaagaggaattaagaagtattttgaactgaatgaaaatgaaaacacagcataacaaaattgtgagatacccaatatggcaggacttagtagtatattaatagcactaaatgcctatgctaggaaaggatgaagatttcaaagaaatatcttctactttacaaaactagcaaaagaagggaagacccaagccaggctaatgaaagctatttctgagtttctaactgcatctcatggggatgatcatttcttttctctgctcttgtggctgaaagcatgttaaggccaaaattgtgattcaggcaagacccaaatttataagaccaagattgcattttaagccataaagagcaggagaatctccatggcttgaactgtgaatagatatttgtttgttatcagagatagtaattgtactgctttatctgtatttccttccatgttagtaaaagaaagctcagaagtagttgatcacatgatcatagagaataaactacatttctcagtctccttggcagctaggtgtagaaatgtggtttaagttctggtcaatgatattttatctattaacgtttgctgtttaagttagtggctaaaaacaataaaaattgcgtatttatttaggattctatggtttggctcagtgctggtgtgcactggcttgtccaacctcttctgggctctctcatttgtctgtgattagctagctggtcaagcagcagttagataggaagacctcactctcatatgtggtggttggcaagctggctgttcactgggacagtaggagcaattattagctggggcacctcagttctctgccatccaacctctaatattccagcaggatagcatgagcttgctcacaaggtgatctcagagttccaagcccagcaagaaagaatgaactctaaatttgcaggcattttaaattgtctgtttgaatcatatttgcaagcattatatgtgctagtatttggccgaagaaaaccaataggtcaatctagagttattgtggaaggatcgtaccaaagagtgtcttagtgtatttttaaaggaaaggggaatgcctttctctctttctacttcttggtggacagcaattggttttagagtatgagtagatttgtattttctcacattaaaaaggtagaatctacaactgtggaatctatagaagtaaactgggtattttcagttgaatcttgggaaactgactaaagttaacatttttaaaaataataatgctttattttatttttaaactacattttaagatatagttaatatacagaaattataatctatatgtgttacagagagattaatgaaatgggagtaaacttgttattttattaatttgtggcagagttcatatagaaagaattgtttttattgacaaaaatatctcgataagacttaggttttggcaagaatcaaggcaatattatacacttttgagatgtctgtgaaaaagtgaccatgtaaagtcaggtgtatagaaaaaagtgaatatgctttatagcagagcaaggaggaagaagagagaagccacagaagatggtagataattggagtgcaagatggtaggtaattggagtgccaatgaaaatctctagctatagggaaactaaagggatattatgaattgcaaagtaatgatttaattcctcttttaccccgaatctttaataaggtttaacgactacaatttgtttgtttgttttgaacaagacttcttgaaattgaggcattagctgagtttcacctctgggtgacatagggcagtgctggcagaagccagaaagacttcaaaatggaagaagcagaagtgtagggtcagggcgactacgaaatgatcaatacgcatagaattcttataaacttaaggaggacttctgtcattcagggatggaattagggtcataggctgccttatctagatttcaaaaggcaaggacgctccagatgatacatgcattacatgtaaataagaatacaacaaggccaggtgcagtggctcaggtctgtaatcccagcaatttgggaggccgaggcggacagatcacctgaggtcaggagttcaggaccagcctgaccaacatggtgaaactgtgtctctactaaaaagataaaaaattagccgtgcctggtggcccagctactggggaggctgaaacaagagagtcacttgaacctgggaggcggaggttgcagtgagccgagatcgcaccattgtactccaaatttgcaggcatttttaaatgtctgtttcaatcatttttcaagagttaaactccatctcaaaaaaaaaaaaaagaaaaaataacaaaacatataaaagataaaggttttgcacttttatttctctttaccttttgcacacttccttgctctttgaaaaagtattgtttacatgtaatgtttaagattattctttgacggaaacatcacatatgtccaatgccttaaggtgtttactatctctttggagaacaggactgatcctgtaaagtaccagcaaagactcaggcctgagttatgggttgatgtacttgaagtgttacaagtatgtacccacacgcctattggattttcatggtatgcctatatgttacacatatccaccaataaatgccatctatttttgtaggctgaatcaaatctctgtcttgagtaatgattttgtatcctttggactagatctgaataagactgagaaacagccaggcacaagaaggcaattcattgttctcactcatctttctaaacctatatgcatctttgatattgaggttcattattagctacaactacatttggtttgcatataaccatttatttttcagtcttagatattttcatatcaattgtcttaattatccttaaataaagcttccagtgagtctctatttcttggatgaggacaattgaggcagtgatagttctttaaaaattatttaatttctaagtccttcactatatcttgtaactgaatcccaacctagatatttttaaatatccttgaaattaaatataaatcaaataatatctttccacatgtaggttacttccctctatggtaactctgcctccaaatgtgaagagctggattcaatccaagtgaaagaaaatcagtggggaaaatgtcagggactataaaagagatttgaagtctgtacccacattgctgtgttagagtcctgagttattaaatttctcatatttatttgacattttatatacatatgtccacttatgaagagtttagttcttatctttctttaatcaacacagtattaactatgcatgtagtagatgaacactgtattttatgtatttgcattcttttcaaaccagatgcttaaagaataaaatgacacagtgttttagctgttattttgctttaaaatgctttaaaacaagaaacatttttggaatttcttatcacaatataaatcagctaagtatatttaatgtggtgaaatgaatcataaataggctgaaatagtcctaaaaggggagttgggtaagaaaaaaatgtattaggatcaatatcaataggcataaataattctattaacaaataacattaaacattgttacactgtttatgggatgatatcattatatcattatagaaagattctcccttaatttaaatacctagcatgtacaaaacaagtttaaatcaatgagacagtaaacaagaggaataaaatagagaggtgggctgggtgcagtgattcacgcctgtaatcccagcactttgggaggccgaggcgggcggatcacgaggtcaagagatcaagaccaatatggtgaaacctcgcctctgctaaaattacaaaaattagctgagcgtggtggcgggcgcctgtagtcccagctactcggaaggctgaggcaggagaatggtgtgaacccagaaggcggagcttgcagtgagccgagattgagccactgcactccagcctgggtgacagagcgagactccatctcaaaaaaaaaaaaaaaaaaaaaaaaaaggggaagtggtgtcctaaagactaaattaactgctgactattttctattttcagtctctacatatttatatttttatttctttatatagcattgaatggttaattccccatttcccttttattcttatacgactaacttctatgggttttattttcattcagttctgtatattccccctgctgaagcctcccatgttgtgtgtcaagaggaaaaatatcttattaccttcttgtctgttgaacatttagttttcttctccctccctccctgtcttgtacctaatgagcaaattatctaaaaatagatacgttcatcattctacaaaatgttgtatcttctctagattggaggacagtgtaattgtaagagacacgtgtctggcaggcagtgcaatcagtgccagaatggattctacaatctacaagagttggatcctgatggctgcagtccctgtaactgcaatacctctgggacagtggatggagatattacctgtcaccaaaattcaggccagtgcaagtgcaaagcaaacgttattggtacgtgtaacgcaaaagtttacagtcacatctctattaccatctggaataaaattctctatttgatttcttaactgaagagtaaagcaaatttctttgctcaagacaggctggaaaaaaaaacaatttggatgaaattaactgtttaaaatgattaaattaataattctatcaaactgcagcttgaagcttagtttaatcaaccctttagaagtttctttattctgtagatgcattaattcccatggtcccatactaataagtcatagaaaaatataatttgcttactgcatagatgtttcttttagaaaattagcactttttcaaaatgttttacacttaatgagttctaagcaaatcatttccatgctagttttcttaatagaccaaaataagtggattttttcaaaatattctgtgctacagggtcctttgtgataaatctttccatttttttctgttatatttctttgaactgttcctatgaaatgcaaaataagtcaacataattctacagatcatgtatattgctagggttacttacaaagggctacataattttaattttgtaattcagcaccaagttgattataataaacagctgccttcggtgttatttatcatttttttatacaagacgtgcttttttgtttgttactcccacaggtatttttcggaaattagatttgattatagcaatttattacatccaacatttttgaggggaaccaccgccacataaggacaaaatttatcaagtgcctaaaatgcactatgttcataatgcactttgaaattttgatatatgagaatattatgagaggaaagtttcctgatgaagtgagccctgtattgtaactgaatatgtcttggttcctataggaagtttaaaaaagacctttgcctttctattgtcattcaagacaccaagtcatccatggtttttctaacactgacctgaaccttacaatagtaaaaatatgcctggcagtgattacacacactcctctctctctctctctctcacacacacacacgaatgcttacatgtacacatgcatatgtacatatcattctgaatactattttcatttctgtgatatacctctaaatctaattctttatcttttatttatgtaagtgtacatcatgctacacaattcagctagacaagcgtttcaatttaataaagagaatgtaggtgtgtttagtggcattacacgagatttctctggtttaaagaaacattacatgaaaatctgtaccataatttacctatatgcatctcaagcatacagaaactaattttttagaaagaaagaataacgtgtaaagagaagtacatatttgtatgtgctatccatgatgctgaaggaattctaagaccctgaattcaatttgtatggcatcctttgttctttaatgtgagatatattttaaactcaagatgtgaaaacaaaagttaaagcaagacctttaaagacagtgaaataattacttctttgtatcaatggaatctttcttgtgatggttagattccagagcttgaggaagggaaaaatcaaaattaatttagaatgtataatgccatccctactatttgcctgttttgttgattgatccagatggttttctgcaggaaacataaatatatattttgtgaagactaaattacttcagtattataaataattattatttctagtgttatttctgcaaatgtagtactttttataaaaacaaaaacttgatatgcatatatatttactttcctaatgggatcagcaagtaactttattcaatttcaccttgttaatatgaaaaaaaaagaagcccagaaaatacaagtgtatgttgtatacgcttcagaaagcaaactgttagagttaacaaaactgttaaatcttactaatgattctatcaccagtaaaatacattagcaccaataattttattaaagtaggtcattcatctagaataaaaagggagaagaatgtgaattaaatgccaagtgtgctaactcgcctgtacttgttaacaccgaatgtgatgccctgtaggccttcctgactatcgttaggaatagattacctgtcaggaatatgtatggcatattcaaataagcactgtgcatatttttaaaactgatatgatatgaatccatgtagaccaattttaatagttcaaaatgagtcataattcttgttaacaatacagttatttttaaaatttgcagcaatagtggtccttttttattttccttattgaaattaaatgatatgccttaggtgagtcattcatcactgttaaagaacttgccttcattggagttcttgaatttttatccatatatatacatatatattatgtatttccttccagtttaggaaatgcttttctacatatgagttcctgagtatgtttttgactcttattttaagattaatttttaaattgcaattatagcttgaaataaatgtttcagttgattcaacccatgcagtgagttatttaaattcatggatatttggaaactatctaaaggaagtattttgcatctaaacatttactattctaatttttttatttctttgccttgtaatacccttttatcttttagaataaccttacttgtcagagatttaagtttaggtgataaaacatttttcttcattcgtaaaatgtatatgtgtactcctttaaatagaagtaatataaaaaacagaatttacttagtgtttaaagaggtatgttctgagtcacacaagatgacaagcaatgtgattgctttatgagccaaggagagcatgatttatattaattgaaaatgataaaatagaggagcatacaaaaggattaaaccaaaaattgccctggataagttttatttatattaattacttaaatgtgtggattcagaaataagtgtatatgctgttttcacaaaaatagttatcagctgacatttttttcttttttcccagcttcacgaaggtataattaaataaaaattgtatatatttatggcagacaacatgatgttttgatatatgtacacattataaaatgattaattccagctaattaatgtatccatcacctcatgtacttatcatgtttttggggtgagaacatttaagatctaatctcttagcaattttcaagtatacaatacattattattaagtatagtcaccatgctgtacaatagagctccagaacttattcattctgtctagctgaaactttgtactcagcttaaccttttattaaacatctttagagatttcttatctttagaaaaacaactaatttgttatatgtaattctactataattttaaatgagcacatttgttaaaatagtttttaagatttgttaaagagaaaaagagctccagcatatgtaacagaaacaacatttgcattaagcatttttctttgcattaagtaataattaaaaatttatgaagttcatcgcaaacagttgtatattaaagctaaattaaatattgtcattgaattttgagagtaagattggccccctatggcattgcttgtgagaaaacactcaatattttgtgttcgtatcatctgcagtagcattgtttgtgtctcgtctatcttgaatgaaatcattttcccatcctcaccttttaaatatattttatctttagggcttaggtgtgatcattgcaattttggatttaaatttctccgaagctttaatgatgttggatgtgagccctgccagtgtaacctccatggctcagtgaacaaattctgcaatcctcactctgggcagtgtgagtgcaaaaaagaagccaaaggacttcagtgtgacacctgcagagaaaacttttatgggttagatgtcaccaattgtaaggcctgtgactgtgacacagctggatccctccctgggactgtctgtaatgctaagacagggcagtgcatctgcaagcccaatgttgaagggagacagtgcaataaatgtttggagggaaacttctacctacggcaaaataattctttcctctgtctgccttgcaactgtgataagactgggacaataaatggctctctgctgtgtaacaaatcaacaggacaatgtccttgcaaattaggggtaacaggtcttcgctgtaatcagtgtgagcctcacaggtacaatttgaccattgacaattttcaacactgccagatgtgtgagtgtgattccttggggacattacctgggaccatttgtgacccaatcagtggccagtgcctgtgtgtgcctaatcgtcaaggaagaaggtgtaatcagtgtcaaccaggtaagaaagaaatgtattacattttcagtgcacaatgacattccttttgttaacttaggtaacttctccctgtttctggtttgtggcttctacaaattttatttccaaaatcattactgtatttatatcattatccaacacatatataactatttaacttattcaaaattatctgcatatttatgttactattttgagaggatactttagataaaactcagccgatcggatttatttcataattgagactcaatttctacacttgaagtaaatctcctttttaacagttttttaaaaatcagatcaacaagagtcaattttattttccagagaaaggaaaatttgagttgaatatccatacaatgccaaatattcaaatgatgaactaaatctctgaataaagctggctaaatgtttttgctgaagaggctatatgttctagttttatatagaaatacctagaattgtttccacatgccatcaaattaataaaataggccactgtttaatctcattatatacaaacttatctttccatctctttcccaattgggagagggatagaccccatctatggctctccttacatttaagattttaactaaaatactataccttctttacaataaattcattatgatatgatgataaatataagtacttatccgttgtttaacagctgtgctaattgttgtcctgtcagccaatattagctctgagttatatgggtctataaaaatgagcatgataccaactcaaaagtgtgatttgcttgccagagaaggagtagaacaaaagttctgttaacatagcaaagaatccagcctaggataattgggccatgcttttcctttggcattggtcagtgtgtaagatcaaagagacaagaaggaattgatgaagagttcattctttttgtgatgtaagtattaaaaaacaacttgaactggtttaaacataaatggagactatattataactagatactccataaaaacctaaggagaaggaccactgcagtcaggactcaggaattagaatgcttccactgatacatattcatttgtctctctctctctctctctctctctctctctctctctctctctctctcagaaggggactttacctctctctttctctacatgggtatatggccaccctatgtcccctgaaattgtttataattctaccaccagccacaacagagcgatttattagctacctcttagttataatttctagaggaaaattcgaattgactcagttttgtttggttggttacctctgagccaattcattgtggccaggggtgtcacgtacttataaaatgagtatagcttttagggaccatttcatcaggtagaagcaaggtggtaagtatcccagaagacaggaagattatggagacctgggcagacagcctaaatgacagatacagcacattcactctttttaccttcaggttaatcctttcaaatttgcaatcaattaactttttgatatcctaagatgagatgtttttttctcttttagtgtttatcaatatctctaattttggcaacaaagtcctttgtctcctacacagtcaaataaccatgatttatacatccttctttctaagtaaaccaaaacaagctaatagatcaaatgttatatccttttgagtaattatcaattgttaaaatttactgttccagtctaactttaattgtatgtataatacaagtcacatgttttaaacaatttttctgattttggaaaaactctgaaatcatagttacaaacatttgttccctttggtccttccaatgaaagacccaatccatcatctcaatactttgtacacctaccagatatctaaatgatgaactaaaattgttagaaaacctttgtttttctggttgttttgcatatcattgcagaaaaagccatggataatttaatctacaccatgcataagactgtctcatttgttcccttcctaggatgaagaaatactgacttcattgctctttcctttatctttgtggctctcattgtggtgatctctttgttcccaactctaagcccttttctcccacccaaatctatggctctttcctgtctaccctatatagtattggcagaataattcccctaaagcacttaattcgttatgtcattctcctgtagggttaccaaaaatgggttttattttgcttatcatttgagtccaatctgggcaaacctttatgagtttttatcttccagtcgcagtctagacacctagctttgcttcctgatattccctttctcccatcttcttcagtcactgcagccacttcactggagctacacatgtcacatgcagagccgatttcaatctacctgatgctttggttcattctcctttcccgacatggaatgcagtataatcctccttttcaatgttagttggcatcctctgactagttttactactcaacatactgcctaaaattctccatcactcagtgaacaacaaagttgacatgagcatcagtgttttaagaggtggtttaactcaaacctatagaaaacttgaaaataaggtgtttttgaaaatgtgctcaagcttctattgtcttcatgttcaatttattatatgaccttgaagagaggtttatgttcaagaaataataatacagatctcattgtaattaccccataattatgcttcttttttctgaagaccatatggacctataaatgaagtcaatgagttaagagtagggagcattaaacatggtgaaaatatttttatttactgaaaaaattcaacagcgtattgtaaaatatttagtagaaaatgtaccagactgagaaaacatatttggagctccatttcttcagcttactgactctctaaaggcattcccctgtccttctctacagggaacttccatattttcttccaactgtccatttctagccaggggtaagcagatttatctttaagctgttacctgagtggagcctgtatcagttctactcatatcctattgatcagagctgctttgtatatccatacctcactgcaaaagaggctggcaaatagatgctctatctgaatatcaaggtatatatttaaaacttggggcctcttttattataaggagtaagaaagagattgatccttgaagacagccttggctatactaggaatgtcctacacctaaaaaaattagctggcagaacattagtcaacttccgaatagatgcttttaatgaccatgagttttgtacttttattgatagatcccattattatcattttttaaaaaaatcagccaaagttaatgaaggcctcttgagtcctgaggaaatatatgcacaaaatcccttcttgggatcttcgactgtttcttacatgctttgccttatagactcactgctattctagtcactcttccttccaaggacatgctacagtttatagtggccctgctgagttattgacccaggatattaacctggttatgaaaagctagaatgatcaagctacagatttggattattatattttgttgaacagtgcagttattttcatatagataaacatttctcttactgagaaatcattttcttctgggtactgttgagttcttaatttaatcagagaacattttatgtgtagtagcaaacggtactttcagtgagcttaaattttgatggggaaactgacagaataatttgcaaataaatatatgatatgaatttaaatagtgatgatttttggatctgtggctctactcaattatgtttctttcttgctaagagtttaagatattatcgaggttaccaaatagactatttatttagcacttttatatcagtgtttagtttccagaaaggtgaactgggtagccatgtttatattgtacaagtgaagtcacattgatattttattgcaatggaaacagtaagtggtttaaaaggaggaatggtgaagtgaaagaaattatcaacctgtttctttttatattattatctaaaactagtcatttttctgtttttctcttttgcattttttctcatttaagatcataagtgcctgttttaaaaagcagcccaatgagatgaccttgttaaaactcctgattatttctcagtatcgtcaattaaatgaaccccttattgtgtgcccacaatgtacaaggaattatatatacatatatatatattttttttttctttttttttcttttgagatggagtctagctctgtcgcccaggctagagggctagagttcagtggcgcagtctcggctcactgccagctctgcctcccaggttcatgtcattctcctgcctcagcctcccgagcagctgggactacaggcctggctaattttttgtattttttttttttttaaagcagagatggggtttcaccgtgttagccaggatggtctcgatctcctgacttcgtgatctgcctgcctaggcctcccaaagtgaggaattatattattattgtagttatgcaagttgaataaggtaatccttgccctcaagatattgaaactttaacaagggaaataagacatttgcacaagtaaataaaatacgataatactttaaatgtgatcattgtttttcagtattagtgttgatgcccattctacatcttcctctaaagaaaagaagacaatttgcaataaacctttggaaaggagttttgttgcgtctgtacttaggcaaatcgtgactaagaagttattctcctaatggccgcacatggtggctcatgcctgtaaccccagcactgagaggctgaggcgggtggatcacctgaggtcaagagtttgagaccagcctgagcaacatggtgaaactccatctctactaaagatacaaaattagctgggcatggtggcacatgcctgtaatcccagctacttgggagactgaggcaggagaatcgcttgaacctgggaggcacagattgcagtgagcagagatggcgccattgcactcctgcctgggcaacaagagccaaactccgtctcaaaaaaaaaaaaacaaaaagacaaatatataccagataaagtcctccaaaaaaagagccaggaaaagagaaaggagaccaggagggggttgcatgaagaaaatttagtattattatccagtattgccattgtttaacataatttgagttttaatcaaaatttacatttgcataatttaaaaaaccaaataaaatgtaaagagccctgccttatcattttcctaggaatttccgtgcttagagaaaacaccttcaactcctttagatgtttattctgggctttcatgtctgtaattctgggttttacatatatttcaccttgatttttaaaatgtagatattatctattgtcttcctcctatagaagatgaatgtttagctcctttcacctcctgcttagcaatccctttatttggttaaatcagtattcagagatttctttattatgactatataaatttactgtacagctatgccatataatatgatttgactatattttctttgctcaaaaaatttgtcttccttagtttttcaggactctctttggcatttctaggaaacaaaactctccaagggaactctgttcaagaaatctatcaggttttgttttttcccactagatatatgagtgggaagttcaggctggttgatctttagttctgttgcacagctatatccaagggctaacatttgctgctatactagggatttccttcccctgtctcctatgttggatcctccatttcctgaatcctacacgttctctcttcttggtttatttgtgtatttggtagagcacatgttctagtagcttctgaaaaagaatacaaggagggaagtaatttgaggagaaaattttgaatatctgaagtgtctttattgtctacaagtgtctaaacataaagaacgatttgaaattttactattatatgaaaacttttcattaaaaaaatttaaatggttgtaccattagctgttagcaatgttaatcagattctttcttcttttctacttttttttttttttttaacgacctggaagtttttaccatctctatatccctgggcactcagtggacccttttgcctatcagtgatggttcttatgttctgagaaaatctgcaaacacattcatagcaacatctagactcatgttcgaccaaacagttggacaccaagcctagccaagttgatgcataaaatcaacaatcacaagcaacctttcacataatgcctgtttacatacttgttgagtccagactttctttagtttaacttctaaaggaaaagcttactgcatcttcctgaagtgtaagagggacaacttcctggttggggaaggtatttagcacaccttatatctgacttcggaaatctctggggctttcaattccaaacctttctgtctagagttacacaacttgaataaattagcttattgtcgggctctccactgcaagagcttagctttttcttataggtatctataattgattgtcatttttctccttctctcttttttttttttttttttttgtttatttcatctctggggatttcaggagggaaacattattcaatctaccatgttttactgacaatgttcccctagtgtttttgaggttttaatcttttcagaccaaatctttgcagacatccttgagccctctcttttccccacaacctttgtctcatctaataaaaccaattctgctgattttaccttcaagtatatccagaatttgaccacttcttgccacccttacttacaccagccaggtccaagccaccttcctctgttcctggactattcaagtagcctcctactcccctttatctttcttccatcacttctcaacagacagccaaagtgatgctgttcaaacttgagtaacatcccatcactccaccttccatttgcttttcaccatagctaataagaaacaaagttgatattctttaataatcctcatggtctataatgtccatgaactctctgacctcatttccacaagtcttcagatcatttcttcctctccagccaacaagcctcattgctgtccttcacaactgttcaatgctctatctcaggcaggtataaaagtacctccatagcagtgctccctatatattttctgaattaatggataattatatttcaaaaatacctcagtggcattctcctgtttttaggtgtgagcctagcaaaggtctgtggtgtttttttcacaacacttacgaaaagcgttgtgttcaaccttgcaaatgaggaaaaataacagtgacctaagtatcatatattttttaacaaaacaagatatagtctgcacatattcatagcccacgaaaagagcaatgtgtgctttggggtggacatttttttattttttattttttattttttttgttttgcttcagaaattccactttaatgtttttttttttcctggttttatggtctcttacagtaaaacttgcattgaaaagagaaacccttatcctgaagtatctttatcataaacagatgtttgcagtagccagccctgcaatgtgcacagtaaaatgtgctgctacaatctgaagctttcatttacttatttaaacatgtctgagagacctagatcatataccacaggggcagacagcatgctggtgtgtgagcagtggggcatggagggagaaggatggggtaggaagggatgagtagcaagcttaaggacttctgcctccctttcatctgtgattgcaaatactgctgacccatagtagatgactgcacatagattcttgtcccactttcctaaaaaacattattaaggaaggtgcatgtaatgaaacctcatgtattattaacctaaccttactacgaatgtacaaggaataggtttaattcaagtaaaatttataggcaatttgttaaagcagcagtgcacattagaaggtacattagagacacattggttttaatatgccattcaataacttgaacagaggttaaaaatgctgcttaacctccattaagtattttaaaaatgctttaatttaaaattatttggagtgtgtgtacatatatgaatgtacacatatccacactaataaatataacactaaatatgttttcccagttccctttttcagtgctggatgaccttataatgttcagcagtaggcacttaatcagaggccaggccgaggaaggcagggaaggatgtcaacgcatcccgagccagtgacccacccttgtccttgagaactagaggcagagagtgcatattgaagactctgtagctttggaataaaacaaaggctaatttataatgaaaacagcttcctatgacatgttttgtactaatagggcagtgcctcctgcttccccctagtatttacttttggttttcttttacaattcataaaacaaagtatcttgtttcattaagtagcacatcatatttattaagtaatgagctcataaactagaattgtgtacaagaccctgccaatggaattggaatcagatgctgatgttccattaaaaatcaatgcatcaaagttgatatccaattatgccacatttcctagtgtttggtgagacaactttctaggttaacatgtttttcacagagagacctgaatctaaaagtaagaacctcttccttgataaatcatcaggaaggaatcttgtcacaggaaatacagaccacaatcttaggtacatctggaaaacaaaaaaaagtaaaagacactgataagaaaaatttctctgtcatagaaaacttgctaattgacaattacaaagatgataatagataatgtttactgagagtccgctgtgtgccaggctctgtgataaggttttgcctgcaaactttcatttaatatgcacaatatttctaagatggaggtgctgggattattctcattttaatctaattgggggaatgaaatctaattaagtagaagagccatttataagtccaggtccatctgactccagaatgtatactctgaaagagtggaactttttctttttctttcttttttttttttttttttttaagacggagtcttgctctgtcgcccaggctggagtgcagtggcacgatctcagctcactgcaagctaagagtggaactttttctaaataactaactcaatatttatcttacacattcacacaacaaatatttgagggtgagttagataaatactgtttatttcatccactttcaagcatacctcaactcatgattctggcttactgcttcacattctgggatacctcatttgttgttcaaaacccaagtagtaggcataaaatgaaaattaacagagtcctgggaaaccacagagttcaaataatgatgaggtaaattgaaggggtctagaaatggaattatctccgagaacttagttggagaaattctggagatggttggaatggcacaggagacaggctttagagcatgcatttgataaacactgaatgggaacagagaatataagttttgctgtggattttgaatatgcatacacatacatatattaattataatctccaagatgtaatcagagttgtcattatttgggttatttgttgttattggatttgattcttagagaatatgttaatgagggcctttcatgggtattcacataaatagaaaaattggattatttatgaaacagaaaattccaataatgttttcccttacatgagcatattattatgtcctttgtttaagagctaagatatagttttagggtgacattttctttctgcagctctgttccatctgttgctgtgacgagcactatattttaaatttattgtgtctgatccatatacactcctctctagactccctgataggacaggccactctgaccaaccactctcatgactcacagatttatgtttaccattttccttttcagtgttaaagggatcatctcatattttagaggatagaagatatttatccatctatccacccattcatccattcagctatctatccatttcattcatacatctgtttttcaataaacatctattgagtaaattaccagagactatgttggtgttaaggtatacaatcacaaatatactaagacattgtgatttagtaggggaaactgactcacatgtaaatgtatcacaatgtgatgagagccatattagaaatatacaatatagagaagtagtaaagtgaaggaaatgattaattcttgaaggatgaggggtcttaggaacttagagaaaatgatttctgaactgacttttaaaaggaaataggaatcagcaagctgctcaagaagggagtagcagcccagaaaaaaaaaataacagcagaacatttaaagcatacctaatttaattgaaaaacccttaaaaattgttttaaaaaagagaaattataccttgggatgaataatattaatatttatgtattcacttgatcaagtctagaagtaattttagcgtgattttatataaaactaccaaatggaggaaaattattattgttttaatttgaaaactaccatcatcaactatactgaaatatagtttacaaacaatacaacaatattgaaaatattgattcataaagccattaccaagatagtcttttgttgcatggatataggtgagccacccatccctccccaggctcttgtgtaactattatgtccattttctgccttaaggtgagagtagtttcttctaaatgtcttacaattagtgcttagccccagcattgccctcctttcttgaataaagcctagaggttacacttcttttctttctccctctcaagaccttggcaaagcctagttgttcatggtcctcaggagagacattgctgggaaatgggctcttcttttatgcccaggacaagtactgtgctatgcaaatagccgctgcaggagataataccagctgccttgctaataactttgaactctgtagattcttctcctaggcaaagccacactattttacaatatgggtgactctttgttttagctggatgatacatttttttccacttgagatttgtcatgtctaaaaccaagggtcagctaaataatatgggaaaataataaactagcgagctgatttggaccatgtatatgtgaactctcagcactacgtaatgcaaggtaataatgttgtcctaatgaccatgcttaagaatgtggtacaaaatcattcatggaatgaaatctcaatatgatcagttacaatgctacagatatataaagatttggaacatgaagaagagctaacaaaggggtatcagaaatgcattacattaaagtaaattgaggtcagttataattaagccacattcaggagttgatgtttaagtggaagggaagggaaaagattgttttctatagttggaagtcataaaaggaggtaatggtctagaattaggcacattcaggtaaggcaagaggtaatctttaagcaggaagttacctgagtcatcctaattagaactgcttaaaaataggacagctaaaatactggtgggattaacctttataatcaggctcctgagaggaggaggggaattaaccccaaggcaaattcccatgcagtcttttcctggaagccctaccttcactttcagtctccctaggtgctttagcatctttttagttcttctctgcttgtacttctgatttttctgtgacattctttattccccaaaacttggactacccaacttctgcaccaaaatgctatcccctacttgtacttacaggtttatctaatacatcatttcttctaaaaatcacccttaatttttccaaattctctgtggcttggagctattgcagtaagtctaaattaattctacttgtaagtatctgtgctaatgggtaatttatccaaattggagagctgttagcacattcatgatgccatcatcatggatttaagggcctagataccttcacaggaagaaaaatacaaagaatcacaaccacagtggccttgaatttaaatggaagccttctgaatttgactttgatcatgtgatgaatcaggtacaagaatatatactaattgtcatggccatgctctatttctggatatgtatatataagggaaattgctgtcaggtggtacaaataaacaaatagcgtaacctggctgtaaattatgataaaaatgatagtattagttgatttccgccaactgaatggcacatattttgagctctttcttttcctctcattgagcacaatgttttctattttgctgcccttgaaactttgtaagacagaatgtataggatctaggggaaggaaaaaaacccaattgttggtaactataagaaaatggcttgttttcaacaagagcctggaatgagttttagagtatcctaattactttttgctgttccctatataatagataagagaatagattcactttttgctcatgctctccttctttcaatatcattgctattttatgaactttaaattagtgtcatgacaattgtacaattcatttttatttgctgtaactgtattcattagaatccttctgtgatccttctaccccattgtttcagtaaaattctttgcagcattttgcacgggcttgtgtgtgtacccatgggtctgtgcatgtgtgtatatgtatatgtacacatacatgaacacacacatcacacaacactaagaaccatttctccctcatatgcctgctccacattcaactgcctgataactttctaattctataacagttaacttccatctcctgggtctgaagagattttaagtaatttgaataaacttttgaatcatatttgtatttctttcctttttccataagaaaaaaaatatgagttttagaggtaagctaaagtctctaaattctgcaggctttttttgtgtgtgtactacttgcagggctcacagcctgtttaataattgaactcatttttatttgttcatcgaatgtgtttggaatgcctactatgtgccaagcagtgtactggctgctagggagacaatgatgaatgaagcagatgggttttctgcccttatggaagttagattttggtggaaatgagattgattataattttcatgaacacttaggaaacaaacaggatgctatgcatttgtaacaggtatacctagcctggcctagggaaagttgcctgaggaagtcacgagacctgacttacatgagtgaactgagcaacagagataggtcaaaatcatcccagcagacagaacggcccatgaaaaggcctttaggtctcaagaagaggaacaaatatgactgcaatggactgagcggggggatgagccatgagctaaagctagagacgtagctgggacctgactgtaggattgaaagctgagtgagagatttggatttatttcctaaagggaataggaagtcatcagttagtttcaaatagagaagtgaaatgtccaaactgcactttggaaaaagactgctacgaagaatagattggaacaggacaagagggatgcaattagaagagatggcctccgggactgggtggtctgggtgtaaacctgggttttgctatccattaactctaccattttaggaaagtgtgttaaccttctcaatcttctgttttccaattgacagaatagatgtaataataattcatgcattatttgcatttctatgacaactaaatgagatgctcaagataaagcccctacagtagcatctagtttgaagtattagttataaaaaaagtggttggtgactttatctgggaggtcgtagcggggatgaagagtggaaggtttaaaattgttaggaggcaacatccataggacttggtaattagcaaaatatagggggtcagagaagtggaggatgcaagcttttgttttagtaaaatacagaattagtttaatttgaatttcagataactttttttagtctgagcaaatgctgcatgggctgcacctttgctaaaaaatttcattatttgttagaaattcaaatgtaactggcttcctatattttataagtctgccctaccaaaggtacctcagtgttctaggcaaagcaactgaatgactggtaatatctgttggaatggagctgattagaggaggtcaagttttttgtagaaatattgaaatattgcatggtagattttaaatacattgaattgtaggacctgggaggcacccaagtccaatgtagataatttactcagtttttctttggtcataattgacacactgaaggacagatataaccacatttgtattgggaattagtgccttggtagagtattctgtttttctgtgtaatcaattattatgctttaaataaaagagtggataaaaagtatatataaaacttttaatttctttatttctaggtttttatatttctccaggcaatgccactggctgcctgccatgctcatgccatacaactggtgcagttaatcacatctgtaatagcctgactggtcagtgtgtttgccaagatgcttccattgctgggcaacgttgtgaccaatgcaaagaccattactttggatttgatcctcagactggaaggtacatctttataagctttaataatttaactctttctttagcaacagttaactttttttggcagttgcaaagcaataacttctgtaaaaagtattttttttgcccggcttggtggctcacacctgtaatcccagcactttgagagaccaaggcaggcggatcacgaggtccgaggtcaagaggtcgatatcatcctggccaacacggtgaaaccccgtctttactaaaactacaaaaattagctgggcaaggtggcatgcacctgtagtcccaactactcagaagtctgaggcagaagaatcgcttgaaccgggaggggtaggttgcagtgagccgagatcgcgccactgtactccagcctgggagacagggcaagactctgtctcaaaaaaaaaaaagtgtttttttgttattgatatgttttttgttccgtgacatccacatttacttaatgtatgctaatctttgaatatttcctagagtgggttgctatatattgatagatgtggcccatcctagcatctgggaatgttgaatgagataaaatatattttctctcaaaaagctgagagtctggatgtggagaaagacaggaaaagacatatctgaagaagaaaatacacatactcatactttctctctctctctctctctctctctgtctctctgtgtatatatattatatatatatattatatatataatatatatatatatatgggatatatgtatgtgctttgttcttcattgcccttgaatttattgcatatttattagttcattgcatctatttatattttccttgcgtttctaatttagctttaaagactggcagatgagaaacatagctttgtattctgtgatatgatttttttcagtatgtaaagtatattatgaaagtaaatcatttttcaaagttacactctctttaatattctacttcttattctctgggtatctgtggccatttgccttcactcatttgtgtttattgctgtatttttgaagatgtgctataatgccaattctgtgtctgtgtgtgtgtgtgtgtgtgagagagagagagagagagagagtgagattatgagcttgtctaaagttcagactaaatctatgaattctttgaagctcctatccctgagaagctagtagtgtgtgctgaactcagaaagcatgtaataaaatgagtcaaatctgtctctcaatatgtgtatatttataaatctaattgctaattatttcagggtttgtgattatctgggctcttttaaactcattgcccccctgctgcctgccttttggctgttccactcctcattaacacctccattagagggtggacaggtgacagggtaattactgaaaaagaacttaaactagttcattttgactttcttttaaaatttgatgtgatttttaaaaactacaaaaatcatttaaaattttattaaaataatttttgttttcttgacatacatgcatatattttaatctgtgacgctctacttctatcaccgtagaaatgttaccttgatggtctgagaccattgtgactcttttctacagatgttattataaatcatctaaatgagtatacaaagcgcatggtacagtaaatagtaaataaaaagcactgtcaggattttgatagtaaaataggagccagttactgcacatactagctcctagatgtaatttttttgaaataatattctacagattccccagttggaactcttgggctggtttgtttcactcctggccacctctgtctttttcatagttctgaccacatttaccaggagaaaaatatcttccccaacccactgtcctccttgcaacactcattcccatcagtgccattttgtgacattcaattacccatttttgttctactcatcccctttgtcagtcttcccagggttatcagcaaaacgcctgctcagtgacctggggatgtctgattgtctcagctttttcacttaactttttttctttaagtgagatctgattcccttcattacactgcttcctctaccctacaatgttcttaaattcgtggctgagccttttaccccattctgttcctctcccattatctacccatctcactctcactccccaccttactttagtccaggaacaagaattgcttaataagtactgttccatcacctgtcactctgcagtaggcctgactagcactggagctagattccctgggttagaaggtggatttaaatgtttacataaattgataaggaataggaaggaccaaagaagtgggtataagctacatttttagaagataccgaagttacaataaagaaagaattcagtctaggcactatggctaactcatgtaatcccagcactttgggaggctaaggtgaccagatcccttgagtccaggagtttaagaccagcctgggcaacatggcaaaaccccatctctgtaaaaaataaaaagttagccaggtgtagtggctcttgcctgtagtcccagctacttgggaggctgatgtgggaggactgcttgagactggaaggtcgaggctgcagtgagtcaagattgtgccactgcactccagcctgggcaacagagcgagaccctgtctcagaaaaaaaaaagcaaaaaagagagagagaaagcagacttcagattcgcaaaaagaatgaggggcaggttggagtctagaaaatagagctaaagtatgagaagctgagtagatttctaaaaatatgaatgattcagattaagtgtggggttttttttttggacagagtctcacactctgtcgcctaggctggagtgcagtggcgtgatctcggctcacttcaacctctgcctcccaggttcaaaagattctcctgcctcagcctcctgagtagctgggattacaggtgcatgccaccatgcctggctaatttttttgtatttttagtggagacagggtttcaccatgttggtcaggctggtcttagactcctgaactcgtgatccgcccacctcggcctcccaaagtgctgggattacaggcttgagccgagtgtgtgttttaaacaaaaagatccacaagttttatataaatgagtttggatatctttacatattagttggctcctgttatattgatgggggtggtgagattacctttttaaaattacaaattgtccttggaaatggtcgcacttttcttccatccctgtattagtccgttttcatgctgctgataaagacatacctgagactgggcaatttacaaaagaaagaagtttacgggacttacaattccacatggcttgggagacctcacaattgcagtggaaggtgaaagacacgtctcacatggtggcagagagaagaaagcttgtgcagggaaactcccctttttaaaaccatcagatatcgtgagacttatttactctcatgagaacagcaggggaaagaccctaccccataattcaatcacctctcactgtgttactcccacaacacatgggaattgtgggagttacaattcaagatgagatttgggtggggacacagccaaaccatatcaatcccctttgttcttatctttccagttccaggttttccttttcagagggattctatttttctcccttttctaactcctgccattattttaaactactttgacatgtactgatgcagttctttggcctcttcattcattccccactccagcaacccatttccatggctacaccctggattttgtgatcacttataatttctctatttctcaaatcttcctaatcccatgaatgctattctatggatatatcacatctttccaattccaattcaccctggaagcctcacataacctgctccttaacttctcttaatctttatcccattatccctccttaatcctcttttgatcaaccccatccctaacttcactgtcttctacttctagcctgaggcaaaacctttttaattatgacccttttgagtacctgattgtgggctcccttctgctgtactgtggggtcagctccagagacgatcaccctacacctgccctgatctgtgaggacgtggggaaagatcatgtgcctatgctgatctgaagcactaccatgtatgtacttcttatcaatttactttctttccccctttaaactcctaccagtctcctcagttttaattccatgctcttgcccttgcagataatctggccctctgctcatagacaaaataaagccagatatatgtatctccagattatcttttctccacctccagcttgtctacattgtcacacatttttaattttttatctagtcttagaagaaaatcctgtgtatttttgcctaaaaataacctgttcccagtccttgatatgatcccttcctgttttcctactcttgttcctccattccatgatctttgctccatcaaatcctccctttattttaactcaaacatctctctataggtaatatcataactgcctacaaaaatgctattcattctacaaactccttcctttgattctgccctgctttatgagccctgaaagttattgtctaatctctcactcttcattcacttactaacatttaaaaagagcactatgattcaagaaaacatgatttaaaaaataaaagatcagattttttttcttcttcattttgtttctttctcattcattctttattcaccatgtgtggtacatacatgttagcagaacatacaagttagcagaacttgcaacatgcagacattcaagaactagttatgtgactattaaattctcatccaaatcaaagacaaggtctataaagagatataataaacaaaaatgggttaaggaaaagacagaatgagggaacaggtttcactggtgggaaaaagggaggggtcagtggtgctttccacttgagtccagtgagaaggtcttatttgatcccttgaagggtgacatgtgtctcctgcagttggagagaccagtgcattgatatctatcttagacctggcaaatctaactgagaagagacagtctacccaggtttggataggtaagctagaagacagtgccctgcatatcttagactcccagagttcatcatgacaaggaagactacgtatttctcatgaccggatgaagaccacaaggaagaaagacagggtaaggttgtcttagtctgtgctcaaagtaccacttagaagataaaggggcctgtgtagaataaaggacaagattactgtggactacaggttaataagcaaccagtcgaaaagaaaatgcatctgactgcactaaaacaaaaggtgagagatacctaatggtgagaaagatcaatgaagaagtcaggaatgtaccactgtcagtgataagtcagttttatgtatatgcaggaccagagacaatagactgctttgggtggttctagtccaagtgagtttctacccttcctgcagcctctacgtgagggaggaggctaaccaagctaccttctctgattatagacttgctgcctttatcatgtcctagcttgatgaaaggaagagaagtatgttcttgaaaatgtctgttctttaaataaagattggaatgttgactaatatacaggattagactttctattttctgaattgaatttgtattttgcaatgtaaagtaactgtaggacattctattgcctgagaaagaccagaaaagccaagtgactaactcattttatatccacatggaacatgggggaattagctccatattatatgtttaaagggtcagtgaaagacaaaaataaaactgatttatgattgcttctcatgacttatggtttctcaatgtgctggtcatttcattgttcccatttatttcttaaaattacctcttcctttggtttccaagattctacttctcttatttgttttctaactctttttttggctactcctttttaatatgtcctttcaatttccacaactgtgtccctgatttcaaccactacatacatgttaatggctttcaaacacatgatcacccattcagatgcctgccacgcactctaggcctgtagccagctgtctctctgagttttacgcttgcaagtccctcgtgcatttcatttttaatatagtcagcacagaactaaccattacttcctcatctccacccaaataaaaataagtcttatgccatctcatgctatcatcatcttggtgaaaaagacgtaaaacttcaaataattattcaagtccaaacttcccaagtttgagtggggcttagattcttctcaggtttggcagaattggctctgttgttgagtagaatgagtctacaggctactgctggaaagtgctatggaaagcaagagctactgtatataatgcagcttctctaaaaagaatagaaagaataaagcttcccatggccatatgggacccaaggagatcagcaggatttgtctcttactaaatcagtcgtgtggaatgctggtaacttgacttgaccctcctatcccactgatgaattcagctgtctcttttcacttcaacattgataatcattacacaggaaatcctgtagcacagaagggcatggagaaggatattttaaaatgtgacaatgagaattgcttgagtttggacttttgttcaacattgaaaagagataaaagtgggttctttttaatgtttttccattcctcttttgaatgataccgttcttgaatctttttttgacttctggttgttattgtatatacaccaacattggctatattgaaaatgtgtaacaattgactaagatatatgggattccatcaagtataagaaatttttgttttttaaaggaaaaaattcacatgtaatgtaaatatatacagatatgcagtataggaaaacagctatgtcctaatgttaaaacaatgtttttgaaaacaaagtagattcaaaatcatttgaatctactttgaaatctaggcactgtggtaggttattacaaatagaaatgtttacatttataaaaattacattccaattataacaaatggaaattaaaacattaattttcaaaatatacagtagattataagtaacttattattatgaaaggggaagatacaagtatcatattatttcttcatcaacttggaaaataacctcacttccttatctgcctggttcacatattccttaccttcttcatgctctatttgttggatatagcaaggtttgctatattgttttctcttggtttatttgctacacagttttttgtattcccaagggcaaaataaataaaataaaatagacctcggccctaaactacacaaccaacaacaaaaatccaggcaacacaacaatgactttttgtgaccaagctggaaaatcatttgcctgtttccatctaagtggtttattcttcaaaagttactgaccagaaaaagggggcatgtattttaaaaagctgatcctagtgcaaacattactccatttacctctgacacataaagcaaacatgatttaatcagtatcgaaaacaatgaagcaaaaaaaatctgcccactgaaaaatcaataatgcaaaaaagtatatagtgtttgtctaacccaaaaacaatgagacaaaaatgggccatatttaattcatctcagttggtagtggagacccatatttgacaccctgcacttactggcactgtcctcaagttgacctgtgactatgactactctcccccatagcccccaggactgctccagttcatctggtaccccacagttttcttacataacaaccacacatcacaacccccaaaagtttcttccctaatgatataccctctctatattctatgttaccttgttttaagccttaaggagttagtggtatcactatttgtcccatttactagctgacacacactgaagttgtccatagagggtaggacaccaaggctggttagggagaataaaggctcagacttctggagcataaaatacagggaagttcttctatgcccagattatttttggttttactgcaaatgttctacatttcagcactaggttatagatttggtccagtaatcttttcacaggcctttatccgattgatctcaattggtcttttctctgagaaccaggtcaatgacttcagatgaaagcagataacttccttgtcaactgatttccttttatggtgtgataatggaaaaattagggagtgtgcctcatagattccctctcctcagtgactctttgtcagacagctggctgtcatctggggtgacagggtaaatgggccacaagcctgtcatcatctggcagccaaggcagggctttctcacaaggcagtggcagatttccaagaaagaaagcagaagcatgcaaagacacttgaggcccgaaccgtcaggatgttacttttaccttattctactggccaaagcaaggcacgaggcttaaccatgtttggaagtggtggggaataaacagactctccttttgatgagtagaactaattatacagttagctgcaaaggacctgcacagagggaaaggtgaagagttgtgatttttgcaatctcctatggctgccaaactatatattctctcttagtatagatgatatatgatctgataagaagtatcagtttttatatattagtagcatttattcaacgtgatgtaataggaataacatgcaactggacatcaggatatccaggtttcagttttgtcttttccactagaccagatacagtagcttcctattattggtggaataaattatctcaaactcagtggcttaaaacaacatgaatttttattatcttatagttctggaaatcagaggctctaaatgagtttcactaggctaaaatcaggcctgtgtttcttatggagattctaggaaaaaaaaaaacatttccttgattttcccagcttttagaggcaacctacaatctttttttttttttttttttctgagatggagttttgctcttgttgcccaggctggagtgcaatggtgcaatctcggctcaccacaacctccgcctcctgggttcaaatgattctcctgcctcagcctcccgagtagctgtgattacaagcatgcagcaccacccccagctaattttgtatttttaatagagacagggtttctccatgttggtcaggctggtttcaaactcccaacctcaggtgatctgcccgccttggcctcccaaagtgctgggattacaggcgtgagccaccgcacccatcgtacattctttagctcatggctccttccttcattttcaaagccagcagagcagtgtttccttggacctctgcttatgtccttacatgttttctctctgactcttaccctcctgccttcctttataaggaccgtagattacattgggcattcttggataatccaggataatctccccatctcaaaatccttaaccacatctgcaaaattccttttaccaagtaaggtaacattcacaagtttggaggattagaacttggatattgttggcgtgggcataatatgacctgctctaccagagttcagcaatctatagcctgggggtcagccacatgtttatgtaaatagagttttattagagcacaccaatgttaattctttacatattttctgtggttgctttcctgctacagcagcagagttgagttacaatagagctcatatggcctgcaaagcctaaaatatttactatctcatcctttatagataaagattgctgaccttgtaactagatttactgtcaccttggacaaattagtctcactaagcataatagaatcataactttatagactgggaaagaaccttaaaagtaattttggttaaactctaccctatacatttctctgcgtaaatcaccttttcagaaaaactggtgaatggccattcagcttctgctccaaaacatggaactaaaaggagctcactgtctcatgaagtagctcatgtttatttcaaacagctgtaattcttcaacaaatagaaatatattatttatattgaccaaaaagttgcagtcttttgactttcttgcctagtcttatttatgccttctgagaccatagagaataagtgaaatctctcttctatctgtgagcactttaaaaatttgattctgctatcatatctgaaagttatttagttatttgcataaatatgtggagtgtcaacaaaggagaaagagacagtgttctcagatcagaaccttgctgagcaagctgcctggacttagctgtcactattgcatggatgcaagggagtcactgcccctggtccagcttttatgagtttctctatttgtgcctgggaaattcaccaaagagggtggggttgcacactgttaacgtctccctttcagatgaggcactcgtatttccttgttcaataagccatgtaaatatggctttcagttcacacagcgtggatgcccaagcctcaaatccctctcctataattctgattccatctccaagagaattcagatgctgttagtagtctgtaactaaagcgaaactaagaagctcaatgaaaccacagctcctctgttaatcggggaaaaccaaactcctctagagggcactgtagcactcaccgaattctgtgaactgagaacactggtttaagagaatctgaacagataccagctcttaaagaaaactgtccattccctgggagtgaggttagccagggggacagagttaagccaataaaaaggggctcaaaagagctaacttgttactagagctacaaaccatgtttggattaatctccggtgtcctatcctaagtctaaagcttccctggtgctttattcactattaattcctgtatccgacaatatttactgaatccttactgtgtgctagcctttgtgttagggactgatggaaaaaactaagacaaaaacaaacaaaaaaactctgccgaatttctccaatttgccttgaagtctcattctcttttgtttattaataatccttatctaaaatcccttagcaattggagatctctttctccttcgttctttatgttgaatgatgtcttcatcatccccattagcaagttagaagaccgggagtaactttatacctatcctcccttctcttttcaattcggcctcccattctaccaattttacttaacatttctcaggtctatcctactcatttccattgctccttgccactgccccaaggtagcattatcttacttctgctcacctttccaggtttatctatcaccatttctcattatgaatttacatccaggagtactgaggtgcttgcaatttcataccctcttctgctttttcttttttttctctatttttgcccctccccgacttccctggcttatttctactcatcttttaacgttcagcccaagcatctcctccaagacttctacttaaaattacccttcccatcccttcttctgctaccagactagttaagttgccccttttctggacctttagagtctggatacatctttattaatgctgtttccgttttttcttgcatacgagattgtgagctccttgaggaccggggcaattctataagattcatctctacatccttgatgtttattccagtcctggaacatagctggccctcaatgaatgttatttatgtcaatcaatatttaaatcaatttgatagtacccatgagctgaggccccatagagaggaggggtgtacaaagagaaatgtcaataaattgacctatatatcttgggatatatctctgggcctcctacagcagttctccctcagatgatgaattttctgacaatgatgtgcattactgaaacatattcctttcattaatagttaggtttcaacagtaataattaggataaccatttctctcactgtttccacaactggaagaaattcctaagaaaggaaggtatatgaaatttgtgatgtaggagacagaggccaacttctttcccattgtaaccagcaaatactgagttatgtaagggtccaaagagaactatcatagcaaagtgctggcagagattagtgatgctttactcctgttttgtttaccataatgaactggtcaataaacatcacaaattgtttatctatataaatcttgacagattactctttatgaaatccatttagcaagcgaggttttcccataaggatgaaaaatgaagattttaaacagattgcgggagaagctctggctgtaccaagagagtcagtgtaataaaggtttctttatattaatattacaaaaaccatttatcctggcaaaatcaatattgcaattcatcttagtttggtgtttctctttctaagcttaaaatgtcttttcctttattatgtataattttgttttaataaatgtgaaatatatttcatttaggaggtactcttgaggagggataacttataaaatgacatcaaatttgtagcttatttgctaaagagtcttggaagtgtttaaaattatatttgagtggctgagaaatctaaaggaatcattttgcttaatccttaattacaaaattatccctgtgtcctttggggtaaaaacaaactacaattttcagaaaagtcttcgcttgtgaacttcatttaggaaaaattctctcttactgaagtcaagtgattataacaagtcagataagttgactataacaatggcttggataagagactataaaatcaagaatagacacatttaattgctcaaaacattgcgtgctttggctggaagaaaatagaactacatcaaggaacggaattatgttatacattggaagctattactctaaatgtactgtatgtaaaataagtgtgattgtctcatgagtgaatggtaataaaaactgaaatactcaagagacacttattcatgagtggtgcagttacacatacatatatacacacacacacacacacacatacattgagagaagcttttctcttattgtttatgctcactaatattatattaaaagcctataaacaatagactctacataatagcctataaagaaattaagagcaaatcaagtatttttgcatctataattccattttaattataatacataattttcttcagctctaaaacttaacctaaacaaaacatctatttgaaatggaattctgatgtaatgtgtatagataaaagacctaatatagttgtttgaagggggaaaatgtccttttatcatgaccataaaaacggcaaactacagtacagtggttttcaagaaaaactgtactttatttattcccaaggggatattagtccataaaacaaatttgcagcttatttggcagtcttagcttttatcagcctttttaagggtgttgaatgattacccaagagatcacactgtaaaaatggcagtggggaaaagtaactccatccgttcagcatctttattagaatatataggtgaatccatttgatgttgttttaaacgtaccacaaggagagtaccttttaaatggtgagtggtcttcttacatgtgctgttttgcttctctaatacctcatggcaccaacgttgcttatcctaattagtgccattggcataggctacatgtttgaataattcactgtgaagaaacaagttttagtttctatcatggcaaaatgccactactggtatttttacaagcaactttgggtccaagaaatttaagttgcactaaagttatcttactatatttatgtcattagcatcttttcataaatcagaataatgctgtattctccaaccattatggataactaagtttagttcataaaacagaaaatgaaatataacccatattaaggcatcaaaaatatttgaacctgtctttctcaagcaattttcttagtgaaatttagtcttcatcgaactaactatagaattttaagatttttagggagagcaatgatttacccctgattttctatttcgcaattggagagtcacttgaaaagataattttatgggtacctaatctaaatgtttagctgacaggaacactgcttttgtaaaagcaaaatttacagcattcttaattgaacaactggattcaaactaatccataagatatattgtgggatgtaaaaaagcaatataatatctttttttgctattaattagtttataaagagaaagctttatacgggttttaccaggaacagtagttttataaagatcttttctattttcctttattttatgttgattctttgtttgtttagctcaagcattcttttcaatatattggctaaaacaagccgtcttactctacaatgctattggtaggtgtaacttatactatgaattattaatcaaaacactattctctttgatggtttatttgccttgttttcagatgtcagccttgtaattgtcatctctcaggagccttgaatgaaacctgtcacttggtcacaggccagtgtttctgtaaacaatttgtcactggctcaaagtgtgatgcttgtgttcccagtgcaagccacttggatgtcaacaatctattgggttgcagcaaaagtaagtgaactctggttcagtgctggtgtgtgaagcagcatcatacaggggactgcatctcattgttttctttctccatttagaacccatcagaaaggcttagtacaatgtgaagaacgtaggtaagagatggaaaaaaatacactgaatgaaatatgtctgcttttccttgattagacaattggaaatggtaatataattatgttcatggtgggaaatttacaatagttttttggagtgaaatcaacaatgaggtgattaaagtcctaggttttcccagaccaagggtcttcccaggacacaagacttttaatggtaaaatcaggactatattggttaaaccaaaacagttggtcaccgacacaaagacatttccaggtaagttatttttttttgacaaataaagggtgaattcttgtttattatatgtttgatattcttccatcccccaaattttgtgggcagtattataccattagttgtttatcgatattgtaataattagtatcattcgtcacgcatattattcatcccataattcatgtttctttctactttaagtttcactcatttaaatatctctcacatttatatttttaattccttaaagcctaagattacatgtaagtatcttttgacttttcaacatcgcttttcagtaccttgaattgacctcacaaggtcacctgcagttctacaatttcataacatattgaccgttttcctatatttacttcaagatcatacatccttaccctttccagaatccctaagaaatgcctgctgggaacatgtggtaggagccctctacaacatattgtgctatgcatattctccttggggtgtcctgagactgtcatgagtcacaatgataggaaacgccacaagtcatgacagatcatcacaaaccagcatgcctggaactctgctatctacatttaaggggggagggagaaagataagtaatgggatattggactccacaacaactgtactagattttgaggtaatggaaagcaggatatagctagtgattaagaagacgtattcatattttgtacctgtgtagtttctcttcagcatcccgcatttcatcagtccctctggatttcagtataagtaaaactgtaggtatttatgcttcttttgggaaagaactgtcataattcctttcatgtataaatacagtctaaacataaatctggacttcattggccacttaattactatgtgtcatttattgattagcaatacaattgattgctttgtatgcaacaaaaattctagcatattccttttggatatgagttatggatcgtcatttataatggaattacaatacctaatcttagtgatttctgattggttctgccactaattttgtgacaatattggcacctgctctactttttgctacctattccttcttgcatttgagacatagtctgggaattatctctcaggcaaaactggatagtcatgtcactggaaagctagcctacaactcttagtagtggtagacatttaattttatgttttattaactggacattctttccaagtgtttctgatttgttagaatttttaaaaactctcacattcctaatgattcttccctggacatattccttttggttttttatctctttaaaattatgatatatcatactgagcacagttcttcaactcttgtggttgttgctgcttctgttttaggtttttatttaacaaaatttttgaaacactgtgtaaagttggaagctcagcatcagcagaggcaatttattagaaacaaatgagacaactttcctgccttcagaggaggtcaaaacatagctagagtgatggacactgataataggaggggagcagaaaaatgtaaatggtgggatgaggatgaagggtcccagccttctctcctgttccagcttgattttcacatggtacttgtgtttgatcctagcagaagccagccagaacaattggcttcacaaagatatgatgaaattgaaaggaatgtagtgctatctattgctgacacagtgaactacctctgactagtatttgtctctgtatccaacagatgtcaagaaatattttcatttaaaattaaaatttctcatggtaccccaccccctacacagtttgggaactgcaggattataaccctcattatatcttctaggggccactagcaataatttagtaatatcatctgtgatttttatttttggtgggctgtcagggtgggaatcctaggatgtaatttccaaaatgcaagaggattgaatgaaaataaagtagttagaccttttcttatagtaaatttcccttttgggtgattcacttctttcctttaaatattggtatcatgctttcaaaatgatagtcattcttcttgataggaagcaaaacaagaattaacataaattaaatagtcctattttctgtatgctttcctagcgaatgatattctagttagttcaaccatctatgaacctaactaaaattatacacatacacacacacacgtatacaattagccacttattgtttgatagtgtttgtcttcttgacactattctcattgttatttattcatctttatatccacattttttctttatctctccttgccagagagcctcttctagctctccttttattaacagctttattaaagtataatttacatattatatatttaacaattttaagtatatggtttgatggattttagtaaatttagacttgtgcaatcattactataatccaattgtagaacacttctgtcatttcaaaaagttcctttgtgcccatttccagtcaatcatgactcccacctctagccccaaacaactagttatagggtctttgatgagataattttgcctttcccatgagttttatataaatgaaattatacaacatttagactttttgcaatgtataggcttttgtatctagcttcatcttaacaaaatgtttttgaggttcagtcatattgttgcatgtctcagtagattcttttaattgctgagtagtattttatggatacactatattttgtttatccattgatcagttgacatttagattgttttcagcattggtctactatgaataatgcatccatgaacatacagttacaagtctctgtgtggacatgcatctttatatctctttatatcctgagaataaaaaggctggtttgtataccaaatatatttttaatgttttaggaaactgccaaattattttccaacatggctgtattattttacatttacattagcaacttataagagatccagttactctatggtctcagcaacatttggcattgactctatttcattatagccattcagtgagtgtgtagtagtatcttgttgtgattttagtttgcatttttcctgctgactaatgttgaacaacttttcatgtgtattgtcattcatgtgatttttggcaaagtatctttgaaatattttgcccgtgttttagttgttagtcctcttactgagttaaagaattccttattaatttgggataaaacttgcaaatagtcctctcattctgtggatttgtttttcattttttttattggtatactttaaaaagcaaaagcttttacttttcatgaagtcaatttaccaagcttttcctttatgggtcatgtttttgtgtcctatctaagaaattttggattgactcaatgtgaaaaaaaaaaattctccatttttatcttacagttttatacttaaacatttacatttagatccatgaaataatttgaattagttttgtacatggtatgagttaagcatctaagttctttatttcatttttattttttgacacataggtatccaaatgttccattaacatttgttgaaattgccatcctttccccattgaattacccaagcatctatgcaaaaatgcagttgaccccatagctaacatcatattcaataatgaaagactgagatctaagatcagacataatacagaaatgcccacatattagccagagcaggtaatcaagaaaaagtaagtaaaagtctcccaaattagaaagttgattttctttacttgtagatgatatgattctatatgtggaaaatccaaacaaattcacaagaaagctactagagctagtaaacaaattcagcaatgttctatgttacaagatcaacacacaaaattagttgtgtttctataagccagcaatgaataatttgaaaaagaaattaataaagcaatttcacttataatgcatcaaaaatttaaccaaggagatgaagacttgtacattatctgttttctgtgtttccaggaaacctatagtataattgcgcaatgttatttctatgcactgttccttttatgcttagccatgtgctctccagtgtctcatgagtttcatgcaggatctgtgtgtgatcacttttctattaggatgctaagatagaagtaattttcccattagtatatattatctgtggtaataaatatattacttattgccaaataagccatttataattcttgggatgtaagaatcaaggatgccttccagcacactggagggtagaggaaataaaggtgatatttattgaacaattactttatacacatatacacacacacacacccctacatacatatgtgcatgcacacacacacacacacacacaaacacacacacaccttatcttcaaaataaccctgacggggagacattatcattctcttaatataaatgagaaaaggttcagagagtccaatcaatatttgactataatcatacaactaccaaagttccaaagctggagattcaagctggtggttcccaaagagatggatctagtcacaatattatactctcatcccataaaagagagtctggcatatgcaaagaccattcttggcaattttgatgagtgaatatgtgaacattttttaggaattctacttcaagcacataaaggttcaagttctctcatgctcaagatttaataatattattctcaaaagtgttggtaagtcatctaaaccttctggcttatgaaaatttcaacttaaataccaaagaggtactatttatttatgctgtggagtcagacaagattgtggttgacatggtcatagcaagtaatcagcttaaatgtttggaaagagcctctgtgtgtgaagaacttttgttgccaaggatattttcatgtaatgcaaatcattttctacaccctttgacatgggagtgaaacatctatctctctttcattttcattcatccccaaagcattttgctgccttagaaaatcatctgaaggtcagttttgattgctctaactctgaaatctgttgtgttcctgatagcatgcagagttttagatgaaatcactaatattcactaaaaaatgttaaattaccatgaattgcaaggttctttgagagtgctgtaaatgaggcagttgatgatatttgtggctccaccaagaacaacaggatttaaaaccctaaattaaaatccactgaaagggtcaaatgcattttcagtgttcaaccgatcaaagtgaccatatcaaatatggaaaattcatgaattcaaaaatgtaaggtgttattcggaaataattcttttctcatgtgtcattatgagattgttgctactcttttcctatgtctaaataggcatatagactgttggaatgttaatagaacaatgcaaattccaaagaagaaaaagacaaaaggagggcaatgagcatgtatctagtttgaatattttaaaacatatgatgtaaatattatctgccttaggatcagactttgtctttaggaagcctattcatagtacatggaattttatatattttacattcagtgctgtgcagaataaaacaacattttccccctctgttctcacaccaccatcaacatagttgaacaagcaattctgcagcattaatatcctacaatccagttcaactcttgcgctatatacctggaagtagtggcagattccacgggtgaggggtcagtccccaaggctgcccccaacttctaacaccaatcacaagctccaggttattttgcctgtgcttgtaacccactggctataaattggggctcctatgactccctccttgggttcaattactttggcagctcagctcaaaataaggaagcacttatttttactgatttatgatacaggatattgcaaagatacagatgaagcaatgcataggacaagatacgtggaaaggggagctgagcttccatgtcctccctaggtgtcacaccctccaggaacttccacgtgttaaactacatggagctctccctgtacccccaccaccccccaccaccccaaacaccctttttgttgttgttgttttagacagagtctcgctctgtcgccaggctggaatgcagtggcgatcttggctcactgcaacttccgactcccgggttcaaacgattcttccgcctgagcctgccgagtagctgggattacaggtgtgtgccaccatgcccagctaatttttgtatttttagtagagacggggtttcaccatgttggccaggatggtcttgatctcctgacctcgtgatccgcccgcctcgaccctttatagcaacttcattggataggcatgactgaagcatggatgtggcagactaccacaattactacttgagaccatcactacaacagttactactgttactatttgagactgtcattacaagactgaatgaaggaggatgaacgcagaaatgaaaacttaaaacaaaaataactattttacaggaagggtaacatggggaagaagaagaggggtccctgcttcttgtgagcaagggcagctgcctgagctgcttcagcccttcatatttattgggtagaaagagcagggaggaggagggcatgattggtcagctgcttgattgatcacagggtcatattattactaacaggcttcagatttgcctaataacaagaaacacttgtgcctgggtcatgactgccctcagcattccttccgggtgcagacgcagtttgtcagcttgccaacatcctgctttcatgagaacagtttgctgtttactcatatagcctccagtggtatacttagttgatcacgaccctcattcttttggccttcaacacatggacaactatgtagaaatgtgatttaaaaaaaaaaaggagtatgatttcatactaatcgactgagtggggaaaccctgcaaggctgcctattcagagtcttcttggcctctctctgcagtattcattcctccagggcatggggcaggactccttctaaaatgagggtctcatgacccacagtcagacaaggtaggtcagagaatttccttatggccggctctaagacagaaaggtggaggaacattagagtatatttttagtttccctggcctgccttggggagaaaaaggaacaggtagaagcagaacagaacagagacagaccctattttctgaggcctacttctgaagcctaaatctccccaatattgtaacaaaagactgtccttcacctgtatcactcttaaattgttctgaagctgcttcaggacccttggataaaagaccaatacttcaacaaaagataggcttattgtgttagtcaccaaggaaatagcaaaggctatggaagttatgagccaggaaccatggacaaaaacgtgtgtgtgtgtgtatggtgtataaatatcaaagtgctcttgaaatcctgtcttaaaatgtaataatttgattatattatatcttttagacagagttcatatattatatctattaaaaagagttcatcactcatgggtcctggtgaattagcaatagctctggggtggaagtctttgcttagtttgcagaataacttcactttactgttccctacttttccactttgctctgtcctccaagattctatgtggtttgcatcagcagcctccattgccctctggccatcagttagttgatttcagctgctaagagggacccaccaaacatctggagggcaggtggaaaaggaagtcaggatatttaattccccgctccctgtgtccatgtagaagcagcctcaagctaactgcatccctccatgagtggtcatagctcctgtcaggtgatgctcttcatacagtcatttctgtccctgagttctgtccccatttaagctagagatagtgtgcagagaagagttaacatagcaagcctgactgcttatttttagaaagacctgcttacaaagttggcctttggctgacatctggatccccactatccccagaactgataagagaggaccactgcacttaaacatttgtacaaagtacggtttatgcttaacacctgctttccttgtgggggtcttaaatttgggtaaatgccagatagaggctgctcataggaacagcccccaataaaaaccctgtgcactgagtttctaaggagcttccctgattggcaacacatcacacatattttcataatgcattgctgggggaattaggcccattctatctctactggaagagaattcttggaagcttgtgcttggtttcccctggacttcattgatatgccttttccctttgttgatgaattctgtaacatttcactgtaataaattttagccatgagtaggactatatgatgagtcctgagtcttcctagtgaatcattagacccagggttcagggttggcttgagaaaccctgacataaatagcaaaagagctctgcagttctgtacctgagagtactggaccatctcttttgcccacccttttgaaagtggttcctttattgagctctccccaagttactttttttgagtgtgctttcttttactgaggcttctagtgactgtagatatttcatataaaaatattaattatttgatggattcttttctgtaccttacatttacatatttcttaacaaaaagatgaatggtttaaaagtaaggtaacacagcaacctgtacccttgacatcttatttaaggagaatgtttgattaggttgtgcttctttaaatggatgggggattgtgcatcttgtttaaactagaaaatagtacgtaaactggtggttgattgtccctaaaaatatttagctgttgtttttctcctttatctttgcgtattctggtgaaaaaaaagaaaattcactctcaaaagcagggagactaagaaaaatttacagtgacagaacacaatgttttcatggtatatatttatattatagaaaacatcacttaagtagtgagatgaatgttcttatttcttatgtgcctgataagcaattgtattacatcttaaaaacacctctaacaggtgatggtacattcatatagtatattcaaatcgtttcttgataatatttagattatttaacatccatagctatttatatcaccaaatattattctttcttttacactgtgctctctgaagcaagataaagcattgtgcttaatggaatggaaagcttcctctcaaaaacccaaagattatgctacttaaatttcaagtttcaatggaacttatgtcaacttttaaattaactatgtaaaaaataaatgttgtgcatccttggatggtttctcaaaaaaaaaaaaaaaaaaggcaaagaaagaaatgcttaatgtaaactatggtggttttttacccccaactatatttatgccagctgctttgacctaaaaagtttttttatgcttatagataaaaagctttgttttagagaactcatgaaccctttgtttattaatgtcttggtaaaccacatgtcttcttgataaagcaatcctgaatcagaaagacctctttgctggatatcttacttcagtttgcttttctgtttattgattgctttgctaataaatgctctcttcattgtaatttagctccattccagcaacctccgcccagaggacaagttcaaagttcttctgctatcaatctctcctggagtccacctgattctccaaatgcccactggcttacttacagtttactcagggatggttttgaaatctacacaacagaggatcaatacccatacagtgagtttaagggtttggtaatagaaataaatattctgagaattgacacattagttaagttctttgacattgaggataaatgctgttgtggtttcctctgtctggcacagagtgtttcaaacagagataaaattacaaatttcactagtaatcaaagaaatacaataaaaatgagatgcttattatctgataaatactaatgcttatcacattctcaaagatgaaaaaaaaatgaccccatcaagaattgatgggaatgtggggaagctggaacttttataaactgctgaggtgtctgtgtgagttcattagtacaacttttcatgtacaataatttgttaaaatctatgaaaaaatctttccttttaacataacatttgacttagcaaacttattttaggaagtttatctcaagtgaacagtcattaagtagacacacaagatgtccatacctattctatttgtaacatcaaaatattgaaaatgattcagatgttcaacaatgtttcaggaaattatagtatatggcataacagaatcctggtacattgttaaataaattataggctatgatagcatataaactgataccttagttcacatatcaataaatggaaaatgttcatgacatattgtttaaggcaggggtccccaatccccaggctgtggacaggtactggtctgtgacctgttaggaacaggaccacacagcaggaggtgagcagcaggccggcgacattactgcctgagccctgcctcctgtcagttctgtggcggcatgagattctcataggaacaggaatcctattgcgaactgtgcatgcgagggatctaggttgcacgctccttatgataatctaataataaatataatgcgcttgaatcatgccaaaaccatccctcctcaccttcccatcctgggtccatggaaaaactgttttccatgaaaccagtccctggggccaaaaaagttggggaccactggtttaaagtaaataaagttattaaaataatctgagaattataccattttaatttacaaatactggaagacataataaatagatctagttttctctaattgtaaatattatagaaaatgtatcaaatatttctattataatgaattcaagttttttaattctcaggttaaagaactattaaatctggcagtggagtactaacactcaagcaaatagtgtaatttaatacacacattgctgtttccgcagagatagaacacagcaacataaacttttgaaagagaaaggatataaacaagccatcaagcctatctttgcctttgtaacttttatgaagattttaaaggagcttatagaaatcaaattattagaattcattgactttaaaaaacatttactcagatgttttagatacagtttccctaaagacagaatgaaaaaaataggaatttttacattattccagctctatcttctctgatttttgcttctagccatgtttagctacacactagtttaagaaacctcggaacagcaattccaattcaagtttctattttgttctcttcatttaatacacagttttccaaattctactttaaccatgcttaattagttggagaactgtttaaagctctgtcgaaacactgaaattccataaccttccttaaaatggttaggaggatgccttgttttaacattttaattgactttaaaactcctgcatcgcatagagttttattttgtatgcattatactgggtttcattttgcacctaattcatataactggaatttagtttcttatgtccacccctttctcttggctctacatgtctcttcagtattccaagtcttctttaaagttaatggaaactctgaacttcatgatgcagattgcaaagggaaatgaacatctgtctacatctgccatgttggcaaagtatcctgaaaacctgctactagaatgtttattttcttccaaatatcagcatgatccaggtgtcctgaaacttaaacttttgtgacagagaaagagaggagttataaaaatattgaaaatgattttgaagatgacagtaccactgattatttctgaagttgtgaattagggtcaccctactttccatacagcttaatgcaatagcaaaattaaacttaaaactatcaatgatattattcaagccagaggcatgatttccatagtaacatattgtgatctattttatagaacatcacatgttagtacaacattggctgtttttgacgattgcactaataaggaatccaaataacattttcttacataataaatgtgtattcattcactaatcagacatttatataatcctattaaacaaggtatcatttcctaaaaccatatttttcattaaaaaatgccacttctggcatttcttgacaatcactgtaattaatgatgtgaaaattatctgcatgatggcatttgaacagtaagaacaattggttaacactgtcagaactttgtatcattctaacaatagcctcatgtttattactctatttctagtgcgtggctagcatgtgtaacatgtaaaggaaacactacttatattcagctggatgaacacaaatctttgggttaaataaaggcattaggaattataggtggagaatcattgaacttttcaaagaaaattaatagtgttgtcttccaagcaagtttgatagtttgtttgagacctttatagaattcttttttagaatggaaactttttctagctggcctaatgtactatgggattctctaagacatattttccttcttaggatcatgatatactggtgtaccatctttaaagctttcaaattatttgttattataatagcatgcaaataatgaataattttaaagattgtgaataattaactttaaaaaacaaggtatatctttacgttttatttaaggtagaggtcaagctagcgcttcgagaatcatacataatcagccctaacagtatctctattgtagcccccttctgggttgctcataggtatcttacgtgtcataggaaggaagtgaacagttattggaggaaatagcactcttctgttagtgttgcaggtttagggagtggacagtaactcatactgttttttggtgttgttcctatttgagtttggaatcaaaggagcactagacatagtaggcagatcaaatttaaaaataaaaacgatcttcattactgatgaaagtcagattagagactatatcctttttcctgcaggaagacaaattagaagagagaaaaatcaatgggctgatctgcacataatttgctccctacaccctgactccccagattcacagtcagatgagttgttcctcatttgggatggcatgaatggggagatagcccttaaatgtcactttagagaaatccttccacaggaactagaggatgattatttttacatgtaacaatgacttctatcacctacagatattatcgtagtttaagcttagaattttagacaaccaaatattttaatgagccctgggatttcatttctacccttattcatttccatctttaaaattataatttataatctcatactacatcaagggatcaatgtaacaagtggtaagatgattcagttagctctgagaggaataaatgaagaaatataagatatagagacaggatgagaaaacagaagagaagatgacaggcaactgtttttataaggctcttaatattcttaatgcggtagtttccccttatccatggttttgttttctgcagtttgttactcatggtcaacaatgttccaaaaataggtgagtctacagtacaataagatgttttgagagagagagaaagaccatattcacataactattattggggtatattgttataattgttctattttattttcagttattgttgttaatctcttactctgcctaacataaattaaactttatcatagatatgtatgtataggaaaaagaacagtatatatacacacatatatatgtatgtatatatatgtgtatatgtgtatatatatacatatatgtatgtgtgtgtatatatatatagtttaatactatttgttgttttaggaatccactggagatcttggaatgtatctcctgtggataagaggggactactatattctttcctggaacaatagatcaaatatgtatagaaaaatcattcatgtgtttaataaaattttgttcagtgcttattccagaccagaaactgtatcagtcattagaaatacaaagatgaaaggaatagttctccttactgagtggggagacatataagtaaaccaaagtaacaatagaatatataaatgttgaagcagagtaaacttggggtgttaaggaagcacacggtggcttgggaggtgtaggaaatgtaaccatgcctgtggtggcaatgatgtgatggagaaccactgaaagtttcccagtaaagaaagaatataagctgaattagccagatactgtagttgaggaagcgtgatggtcatgaaataaattttgtattaaaagaaaataaggtatattcagcaatcatgggcagttccatgtagctttggtaagtggtacaatgggggagtgctacaaaccaggagggtatcagccaagatcacaaatcagtgctgagccaaggactgtaaatgtttctctgaaaatgcagaagtctgtagtaacagcaaattttcaaattcagtgttaaagatccgtaccccaaccaaggagagcaactaccttgagataagcactcttttaacctgagtattatttttttgttatggatcattaatggatatcctattcataccctttcaaatgcttttatatctttcacactataaattgccttatatgatattcctacacaaatgcatatttccatcccaattctatctgattctaatttcttattaagtagactgctcttgtataatacattctgatctattaggattatattccacttttcagatgctacaaacattcagcaagtactgtacttcttttaattgtcatcaggttataagtcttccaacttccagtttaagcttatgccagacaatcttttggaatattcagcactgaaatttatttttttcttttaggttttggcttttggcatgctaaattattttccatcgttgttctagccttcagtgatttttcaaattttgttaatgttttcaacaaccttattgtgggataagggtaactttaatctaatctagtaaatatttattgaaataacaatgagccacagctgcacgctctctagaaagtctgaatctcagccctaggggacttttccaaatatgatccttctttgggtgctctgccttagcactaaggatggtgactttcccctgtctcttctattcctatattctttagagttttctgtaccacttagaaagtaaaaccaggcgacctctggtacccatggtacaactgaaaacagccaccagagagagaactgtctcaccttcctcggctctatcagggtcatctctgataagacagtggccctcacctgagtcagtgcccaaggtgccccccacaacaccagcggaggcctcctccactgagcagtcggaccccagagtgctctgtaggagctgtagactgggaagaagggccgggtgtggtggctcatggctgtcatcccaacactttgggaagctgaggtgggcggattgcttgagcccaggggttcaagaccaacctaggcaaaatggtgcaaccctatctctacaaaaaatacaaaaattagccgggcgtggtggtgggcacctgtagtcccagctattctatttgggagactgaggcaggagaatcgcttgaacccgggaggcagaagttgcagtgagccgagattgtgccactgcactccagcctgggtgacaaagtcagaccctgtcttcaaaaaaaaaaaaaaaagaaaaaagactgggaatgcctaggtttacacgatgggttatcactccaaagatttgtgtcttttgtggccaatggcagatccaggaaagaaatgaaagttgccgatggggataggctgggggagagcaatacagatgtgtatgggaaaccccaacccatatatattgtaaatagatggactaggctaaacattgttgctgtttcagtcttctgcaaactcagcttttccacaataaagctctatctcctgtcggaaggaaggaaggaaggaaggaaggaaggaaggaaggaaggaagggagggagggagggagggagggagggagggagggatggatggggggaggggaaggggaaggggaagcacataaatatgctgggaccttcatattgctatagggcacccctgcttaatggaaccctcctcgcatctccaatgcaaacagccccatggcggagcaggcagcagccactctggtatttgtgtgtttcgcagtcctacagtgtgtttcctgtccttagagaacaaggatttccagccatgtgcctaatcacctccactccctatcttattttttaaaaacctctttgtagctgcttctctttgccctcacaatccttcatgcatagaagtcctgcttatctaaaacttctgttgtgtaaattcctcattgctgataacaaatgtctccaaaatttagcagcttaaaacaataaacatttataatttctgtaggtcagaaaataagaaaattttccattcaagatgttggccaggtgacagatttaccccttggtggtagtttactgacccttagtctggtgtgtttagtgtttaacaagcaaacaagttacatagaggaaacatagttacttttctgttttggagaaccgcaaggactttctcttagaccttctaacaaaaggacactatgaaaagcaaaagaagaactaaaacaaacatctaaacattctttattatgaatgatactttcttatactcaataataaaagcaatcaaccggtatttacattatttcaattttaaaaatatgaaatgtatccttaatcaaaagagtagattggtatagtttatgtaattaaataatatgataggaaagcagttagcaatgattcttcaccaacttgtgaaatgtaactttgttttttttttttcttttcatttcaggtattcaatacttcttagacacagacctgttaccatataccaaatattcctattacattgagaccaccaatgtgcatggttcaacaaggagtgtagctgtcacttacaagacaaaaccaggggtcccagagggaaacttgactttaagttatatcattcctattggctcagactctgtgacacttacctggacaacactctcaaatcaatctggtcccatagagaaatatattttgtcctgtgcccctttggctggtggtcagccatgtgtttcctacgaaggtcatgaaacctcagctaccatctggaatctggttccatttgccaagtacgatttttctgtacaggcgtgtactagcgggggctgtttacacagcttgcccattacagtgaccacagcccaggcccctccccaaagactaagtccacctaagatgcagaaaatcagttctacagaacttcatgtagaatggtctccaccagcggaactaaatggtaagaatccaaggctgagattcccctttttggtcaagacatgaatgagaatctattgtaattgtgcaattaggaatttggcagttgtattcctttttataactgcacaatataataattgagaaacagtttctaaagatataagatagtatttgtcctggttagtggaacaagtgtatttcttctaatctaataacaaattccattcaattaaattgccccttaaaaggctaatattatctttgctcttaatgacatctgccataacacaaatgatgtttataatttgaaactcacttatgaaatgcattatatttgactgtgtcacaagttagggcacccacaagcagtacatttttctcttctaagcaagaaaaagatataaaatgatacaaaaaatatgtatataagctaactgactccattaagttaatttttgcattcatgcatttgaacccttggttatataggccagacacacattcacagatttttaatcatttatatcatgtacatattatagcaaaatctttctttagatttgtaaagttatttggtaaaactgggtagagattgactataacatttatgcaaacagggcttatgttaaacaagttaaattaaaacctccaaatttgaaaggatacagactggagctataatgatcaaattccccaaaagaactggccattcttaacagaaattgtgaatatcaattctgaaaaagattgaatttacctatgataaagtgtagttattttttgtctatgtgttatccattttggtttgttttcctcatgagtatgcctttaatagtattttatacattcatctatatagcagtttgttgtcttctatgtacctgtcatctagattactaaactactaaatcactacattttgaatgctaaagaaattgacagtaatctaattagaaagacaatgaatatccagcactctttaactgacctgtccctaccctacccctaaagtaacccctttgtctgatgagttacgtaggttcactatttaatttctctaggaataattataagatatgaactatacatgagaagactgagatctactaaagaaaccacatctgaggaaagtcgagtttttcagagcagtggttggctcagtcctcattcatttgtagaatcggccaatgaaaatgcattaaaacctcctcaaacaatgacaaccatcactggcttggagccatacaccaagtatgagttcagagtcttagctgtgaatatggctggaagtgtgtcttctgcctgggtctcagaaagaacgggagaatcaggtaaagatcaatgttttaaattctacttttaaaacctctgaatgcaaatgtttcctcaaattaaagtcaaagtactgtgaaagtacattttgaaaagcaagaattagaaacttccatagaccaaggaaaattttcatatatatggatttgttacataaacaactcaaggtcataaagtacttgcagcaagttctagggggcaaaagtaaatgctttagttattaattcatggggcgaaaatggcttaactatagttatagtcttctgggaatgtttgtcaaaaatagcatttggtttccactcctgaagtggattggacacatgtctcatcttgctccatatacagcctaatttatgttcaatgaaagagataactgtcaccaattccacaaatttgtctttgtttttatttatctttccaaaataaatagtttagatactagattgtacataatgacagaatcgtggacatcaaaatctataattcacaagtgtgcttgtaagcagttggcatgatgataaggaaggaggacaacatatctaaattttctggattatcttcattaaggcaaaaatttttaatcctccactttattttttatattaaaacacttcaaatttcatgagcctttaagaaaaaaaatacacttttgttatgtgtttaatctgtagatatcaaagaaacccaaaccctgatctaaacttgacctgttaggaatatggaggatgagggtagctttaggttgatgtccaagggaatcatttcatgaataaaatacgcattgtgcttgagcatctcttaatgactaccagccatcttggacaaataatagagccatgatagcacaagtgatgaggcatggcattctggaaggggaaaatcaaggtcagaaatgaaaagtaatgggtgaaactgcaatactggtccctcgtaatcttatgggtcactagctaatgaaagtgcaatgagttcctttgataatacacctttggttagcacatttaaaatccctgtaaagagctcaggagtggcaggggggaaagggaaatgcatgtgtatgtaacctgaacatttcaagaaaaatttaacaaaaactttgagacattcattggggttatttagaatgctttaggtttacctctttctgaagaataatattcagccagctgcattggattggctcaatgacatatttccctacatgggaaatccagtacatcaccatgcatttttctgaactttttgaactgagatgttctatttttgtgacgttttttagatactcgtaagacttataatttcctatctatccactttcctatctttatgaacatgagcaaattcctatgagatttttattttgcaagtagaaagtagctggtaatatgaagatggagaatatactttcagataacattttaaaaagtgaataccttttacatataccagcatattcttggactttttcaaagcagaatattttaaaaggtaaaggtatttcagaaactaaatgaatgtgtgaattaaatttaaaaatatatagggacgacattcattgttttgatgttattgttattgttctcattgatagcacctgtattcatgatccctccttcagtctttcccctctcttcgtactctctcaatatctcctgggagaagccagcagataatgttacaagaggaaaagttgtggggtatgacatcaatatgctttctgaacaatcacctcaacagtctattcccatggcgttttcacaggtattgttatttttaactaatgtcctttcagaattggcttagggcttcatttggacattttttgagtttgcagaattctgtgacagaattctccctctatattgattaaacagggcattttttcttaatataatattatgtgtacaagcctccctctttgtatgtcacttgtatttttccagtataatcatatattgaaactaagttggtataatttatttcataagacttgttttttttccatttatcatgtatccttaaatattttacatgaagttgactttcattaactgtgtactatcatgttatttggacacacaataattatttaaccagtccacactcagttgatattgtattgtattaattcttttggaaatataaataacattgataaaacttcttatatgtacatttcatatacatttctacttcaaaaatctgaagaattgaatttatcacagcttataacaaaatgaattatgaatatgttcaaagttttgaatatacagtcatatattgccttctagtaattcatcccccagctagcagtagtgagaataattatcatagctaaaagttactgaggctttactgtgtacgtgaactaattcatctgatacatacagcaatcctagaggataggaggctcttgttctctccagtttacagttgtggctgatatacctctctgcccattttaccagcatccaggtggccaatagcagaagctgatggaaggatgtcaaccgaacaagttcttctgtgtatttggctgttcagtgcctcctctgagagagatgctcttctctgggcattagcataagataaaaagatctttacactttatacctactcccatagatctagccacatttttctttccatgaattcctagttcctgatccttccatctttttttttcatgcccttggccaatatttccaagccactgccatattgtccaggtacattttaccttgagacacgtctctttccacacaacatgggtgaccaggtgaactgcctgaagttctgcccactaagaggatttcttcgctctgctgtttcacagggtcatctctgacaagggttttagagcaacagctaccatttagacttgcagccacataccaagacatcctatctgtaaactaaattctgctttttttccacattctttcagctcttaagggacctcccatgggtcataggtatgagctgaggttgagccaccagtataagaatggtggatgtcatgggggcctgaaccacctgcttgcacaatgtattacggcttttggctctgcttatacccaatctcagacatccacttccattttatgatgaatttctgttgggcccttctaacctcaagacttggctgagacaattccaagattataaaaaagtagctctagctgcatggctatttggtgttccatgaccagatgttctgtttttactgaagcctgaaagcatgctagggccatttagcaaatggtatatagtttccattacatgttatgcctttgttccaagctcttggggtctatctgccctgtgattctctttctatgtgtgccttgcaacattttttcccacaatgcttacctctagtgctgtaaaaattactacatgttatgtcccaagtggctcatctgcctgtaccacaggctggacctggtgcagagccctttccgcctctgggatacactcaaaactggcagcattccatattactcagtaaatttctcagaacagtattctcaaatgtggaatatgctcccttcagaatgtgaagaggtcaactagacattttgtttccttcttagtggtggtagaagcaaggtgcaataatttgtcctttattttggaggggatatcctagcatgtctcaggccacttgaactcctaaaaacttcactgatatggtagattccttaatcttcataatattgctgtctcactttctagaacacatatgtcttacctctgcatacctaccatttcttgtttgtctgattcatttaatatgatgctatcgatataaagaatactgtcaaggtggcatttatagtttgtcttaaattggtgattaatcaccctcagatttcctttgtctttcttcagtgcattgatggcgaccagcaagatccatgcattgtccttataattactagtttccccagagtagtccttgtaattactaattccaccaaaccagtgaattaccttctactggtaactcatcgcagttcaccactaatggaagtttaagcattgcaccactagggcatgctgtggactgttagtactctacctgctgtctatgatgagatcattgtaaaccagcaagtggatgatggagctccaaaatatcattttagagtctccttcctagggccagtcctgttacgactatcttagggcaaattcccccggaagcagactcttggtagaggactgagtacaggaggtttattgggggaactctttcagaaacaacaaatgtgaagtgataaagtatgtaggattgagcagcaaagaagctgaactgtgatgcaatagtggaagcagcctcagcggattccgtgggtagttctggagctgaaatgaccctcttagcttatctcaaattaagctaggaagtcagacctttgtaccctagagtatttgtgtcctcgggctggtgtaacaaattaacataaactgagtgtcttaaaacaacggaaatttaggtgttagtacagccaggtcccccacaggctctaggagacaattcttctcttctacctacctgtggctcctggtgttccttggcttgtggcaacataactctaatatctgctgcctctgtcttcacaagtcctactctgtgtctctgtctcctctgggtctgtgtgtccgtctcatttctcccataaaaataccagtcattggattttaagctaacctgaaatccaggatgacaactaattaattacatctgcaaagaccttatttccaaacaaggtcttattctgaatttttgggagacactatacaatccactactaataggtttgccatttttttctaagcctttttaggagaccagaacccatgtacaacacacaattttattttctatactgatgaaaaagaagagccaataaataatttatgattacttatttttcattaatctgtctacgtgttcactcatttgcaattatctcatgatgaatacacaactggcataatatatatattttgacttaaacaggttagtctaccgatctggtataccatgggatttaaggtaaagttagttgtaactttcatgtggtctttgccatgttgtatctcatttatactcaatgttttattttgttgtttttactattctctggctttataaactattctttctttgtaaaacacagttttgatttatctattacttatattatagtagttgttgttctaagaaaaaaataaggtgagaaatattatttataaaatacagccttagaagtcaacctgtttgttcatattccacatctcccaattattagctgtatcacacgtctctctgcttctggttttattcatctgtgaaatgggaaaaccatttttgctcacctacctgcttaaagagcctgataaatattgacacattattattagtgattattattaatggtgtggaactacattatactttataaactagctatcatttaatggggcaggaaaataaatatttttattattgttgttgttatttaaaaggctgttccttatggctgaactggaataaggacatagatatatcaccttattctcttttttatttttatttctttgagacagagtctcgctctgtcacccaggcttgagtgcagtggcgcaatctcagttcactgcaatcttctcttcctgggttcaagcaattcttgtgcttcagccttccaagtagctgggactacaggtgtgtgccactacacctgactaattttttttttaatttttatttttagtagagacagggttttgccatctttgccaggttggtcttgaacccctagcctcaagtgatccacccgcctcggtctcccaaaatactgggattacaggcatgagccactgcactgggcctaccttattctcttttgaactctctctcctgtgcaaatattctctgttcaaggaaatgaaatcaaaagtagcagaacaaagtccaattttttaccttctcaatgattaaatttgtatctgaactgacctgagtatgtcttgttataatctttgtaaataaatagccaaaattcccagggaaaatctactataaaaataactagtaagaaacctttgcctaagaatgagacaggggggatacgtaaaagtggtgatgatgtaggattcattgtgggggatcaagctgctgtagaatttttcctacccctttgaagacttatttcatgaaaaactttcaattagatagattttataagacttataaattgactctatgtacatgataaagacaaagtctatccaagtgataattttatgctgcaagttctggggccaataatgtatttttaaaataatgtaatttataataatcatctgtaaagaaggaaaagccttttcaaaataaatattagtgtagatttcttctttcttattttatttcatcgtgggttcttgctacaaagaatattttgcttaaaaaatagttgtacttcctaaattaaataagaaatagcttcatgtactttatcctaaaaacaataccattttctaaaaatttacattgaaatctaccaggattattctaaaagggatgaatattacagcaatattcataagtttaactcagttcaaggtttattttacttagaaaattttaaatcacatttcacagaaaagtttgtatcttcattatatcaataatgattttaaaattagaaaaataaagaattacttggtatttgatgtttttcttatttcaaaatgtaattgcaaggaaatggttttaaagttttaaatttaaattattcctagagttttagaatctttaaaaacacctttatttctgaatgttattgaaacactgtattctacattccaatctcactgctttttagaacaactcatgtaacttacgaaattttaaagtcaacacctaggcaaatattccaaatgaattttattttacccctaaagagaaagtctctagaaaactactccaaatgttactgaactttacatttatctgtatttatatttatggaagattattttatatgactatgtatcagtagccctaagaaaattagttttgtactcatagttactgtcatactctctgttttaatgacttttattttctgaatataatttctagtggcctttgtacctacaacctaaacaaatttacatggttgcttttgatcacttcaaattataatgacagaaccaactctcaatgttaattgtttaataatttatttatggactgtgagtttcctgtcagtcttctttgctcaaatctgctattttcatttgaaattatatgataaagataatatttcaaataacgtaactgtttgatctaatctttatatgtttgtttatataagaaagatgattgagaattgacttaacgtggatgctcagtaatatgcttaatgtttaattttttcccctttttcttctgtgactttttttcataaagaaaatgatagtatcgatttaacatagcaacggcatttctttctgtcctagcaccatcaaatagcttgggtattactgctctgggttacttttggccaagccccatggctttgtttggactttatcatgataacaatgacaatgtcaccgtctttatctctaccattggtgacaataaccataccaccatgctgctttatgaggcaataacttggttttctcatttatccactcaggaactggattattacctcataaaacagtgtgattgtacaataatcaattaaatcctggcttgtcgagactcttcagaaaaaaaaaaaaaaacccttttcctaatggtggttggcaataattccctctgtctgaattcatggaactttgactgccaaggttatattttcacactgattacctattatctttctttctttctttctttcttttttgccttgaagctgttgcacactgctaaatcccaagaactatcttacactgtagaaggactgaaaccttataggatatatgagtttactattactctctgcaattcagttggttgtgtgaccagtgcttcgggagcaggacaaactttagcagcaggtaagcaagttttaatggatatgaaaaatctgttgcctatcaagaaaaaaaacttataatattcaacaccttctctacttgagactttatatttgtcttctcctccctcactaactctgattgcttcttacctcaacagttttaaacaacaacaaccaaaacgtaacttaaagaggtacctaggagctacgagttacagctgtgtcataataagaaatataattagtggtagagtgactccactctacaactagaaatatatagaatatacaactagaaacatatacaaatatatagaactagaaatacatagaaatgtaattagttgtagcgtgactccagggcttaactaccaacctgtgtcctagcagtgtcctgacaattgtgagaaacaatcaggaagcttcttatgaggacgttaggatacctcttccctcagtccagacattttttgtaggcttggctctactcactcctgatccatgggaacatctagaaattactgtgtggcctggtgttatatttggctttcatgaaataggtaaatgtttatctattgttttattaagaagaagcttttaagttaataaaatttaaataaaagaattgttattaagtataatctgagtagaaatggtttgtataatttgtgcttgcttcattcaggactaactggattcatacaaacctgattacatgtattagtaagacttataaaacccaattatttagcattaatatattttcaaatcagtgtttttctgattctagataaaagcttagtttcctggttatctttaaagaaatgtccatgtgtaaggaggttaagacactctagatgaattacagatattacgaaaattcatgtttacctgtaaaaacatttcctagacctcctccccaaatcccttcatcctattattaataggtccaattatgtagggttttttttctggttctggaaaaaattgcttagctcaaatgatctcatccaagtaatttatttttttcaaaattttcattaatgcaaacaactctgaaattctaagaaattatggtttactaaatttataactgaacactttgtatttttatgtattttatagatgtgcatttcagatgcatgaatacattgatggagtacctagcttgtacaaaacactcttctcctataaaactatctgtttttgtatactgtattattaaaggtttactgaatgctgaatatggacagcagaggaggactctatctcctttaaatgatacaatttcagactagaagacaaaaattaaaataagaatcagtcttacaagttggagaaagtaaaaatggagacaacggagggtgaagactgggtgtgttatagtaggggacatagggatcccaagcacgtggccatgcaaaactggaatcacatcctctcagggttgcaaaacatgtaaaaataatctagtgttactatatagccagtatcaatatattctttgtaatattcccccaagtgttcatctaacccatgtctgataccttcagtgttacagaaactactacgtctcagacaaagctataccatctttagatacctcttttagaatgtgatttcttagattggtcaaaaatatctcctagtaacttctactcaacattcttattctacttccttgggggctgtcgttaacctaatttatcatccttccaataacattttcaataacattatatccacccaagtcttttctcctttaggctgcatatcatggtggttcccatctgaacctcatatgcaatagtgtctagagctgttattagtataattcttgtagatgagatctagtctgccttttcatagatataagcaaactaaagaacctgaagagagacatgcccgtccctagaaactagctggatcatggagatgggaatagaagagcaggaaacatgtctacagaatagaatctgcctgccctatgcattagtggtaacatctgtgctaatagtatcctcattggttgcagtggcaaaatcctgttgcgtaaaagatgatgtacctgggtgctctgtgcagctctcattttagttactggtgaggcgattaaaacgactcctgtccactggcaggattgtgaagtaaaactaactagtcagagccctctgaatcctctctctattttttttatccttgaaaaatagaactggaaacttatattcgctaaaagtcatgtgacgtgaaagttagttgacttacaaaaataagagtttattcatatatgtgaggggaaaaaaatggttagccaaaatgccagggtttcaatccgggctctgccattgactagctgtgtgaccttatataaattatctaacctctgtgccttagttttccaatttataaataagcataacttatttgtagggttctgatgaggattagaattagttaatacatgtaaaatatttaaagcagtgcccatcacagttcattctcaataaaaatttattgtcatgatttttatcataatattatagaagacttttgttagtcacagtataaatgttatggaatttctaatgttatcaaaatcaaggagagtttattttacaactttgattttctaacattattataaaatataaaatggagagttctaaaactaaggattgtattgtgaaaataaaacttagaaaggcttaaaatctgaaagcattatttattatttctgtaagaagtatgtcattcagaattattatgcacatttcaaaactttgctcaaaaacagcaaatttcacatttgttggttgcaatatagagttaataatgtgccataaatgtattattactacattttattgtgaatgctcaattcagaaccatctcttgagggcttactatttaaagcactgtggaggattctaagataattatactcagcatttgggttaaggagttgagatccaacaggtaggattaacaccatggcgacatgtgctaagggctgtgagaaaggtgaaaaaaatgctatgggaaggtagaaaatgagataaatgattttgatttgggagactgagtagatacctcattaaatgctatttcagataaactataaaagaatggtaaagactttcgcagatatttactgagcacatacaatgtgctagtttctgttttaggggctggcactgttccaagtactgatgtaatgaaagcagagatttatgaagacttccctggtggtagagtacacaatagattagaagagggagtgtaataagtgtctggtagacttttttaaaaaggcaataagagagtaaatcagacgagtagaagtgaagattgaaagaagggaatggagtgacttcaaggaagacagacctggaagttaagcagtgggaaggatggacaatgatagcaaatattgcagcccatggtggtgccattaaataaaaggggaaagatgaacaaagaacagatgggagaaataaactcgtgagtttatttgatcatttgatagaaacacatccatgccaattataaccatccaggagcagaaattgcaaatctggggcttaaaaatgatgcagattttgtattcatctgcatatagatgggagctaatgctataggttataatcaattagtgaaagcagagaaaatgcaaaatggaagcccaaagaaaacaccttagtgaatattctatctgggaagaaagaagaaaggaagagtgaagtgaacagaggtatggtcagaattaggaaaagaactgagaggaagcagtatcagaaaagtcaagggaagagagaattctagaaggagaatattgtctgcagtgtcatatggtatagggaaagcaagagaaatgtgacctaaaatggatgcgaggtcactggtgactctctggggattaccctaattagcatggttgaagcagaagctggaacatgaaggattgagcagcggcaggaggagatatagtggtaaatttcaaatgtgtttttttttttttattctttgctaaaatttttcttctacccaattttcattcttcaaaaaattgtattaccttttgtttccatataaaatcctttcttttctaaagaaaaatttattttagtgtttgtttttttctggaaaaaatgtttattttctaattccttaatatattttgttagaactatctgattcttcacctgcccagcagaaaaagaaagtctcttatatgacaaaagtatggaaaaataatttttacttacagttgggtttattataaaatacatcatttttagggttgttcagatcagtgaaaataaacttatttgcttttatttgaataccaggaaaaaattataaatccatcattctttttgcctccttccttattcagtagatgaatgtgtatttctaaatgtttttccaaaacaaaacatctgaatagaaagtatagacattaaatcatagaaatacactgcagacctataataaagccagttctttagaatggtcaacaattttgctataggagagtaataaaagttgacttgcaactttactgttcatcctgctctgttttttctactattaacattgcaatttggagagtatatattattccaatgaactccaatggatttgtgggaaatttaactcttatgtctaatagctcatatgagctcattatcagacatcaatggaaacgagtgaccattcaaaaattttgaaaaagagcaccacaaattagaagtagtaattagccttttggaagcatttgaatcatgaaaagatatgttgcccccttaaatctcggtctcaaaaatcagaaagatacttgtgaagatttatcttgctgtttcattaaaaagcttgagaattataattggctctctcttgttttaaacattttttcaattaaatatatgattagaatgggtacatttcatccagagtattgcactgctgcttctttagtttcaatgcctgtgacaaagtctgagaactgatttgagagaggtgttctctcaggagcagctgcatctctctccattgcaaaatcttcaagcagtgttattaatggctttggagttgcttctgggtgtatgaaggtaatgagttgatgaactgggccctcttaaaatccttgttacacttttctttaagattctccttttaatccgagaaatttgtgcatttccacccattgcaaattgagtttagtttaaacccttcttatgagaaattacttttggagatccattcctgaagggacaatgtgatatttcccttgcctgtcataaattgacctccatactacaagcttagaagtgcccatctcgcataaaacaagtaattggtgtgcattaaattttctttctgaatgcaaagtaaaatgtataggctgtttgctgctgggttgaaaacacacattgttttgcattcgggtacataagtcttttccttgtgaataggagccagagtgattaaacaagcactcttaatatgttaatttataattttaattacaacaatcttgtatatatagtcattagtgaatactaatataaatatttttctacctttttattcataatgcataaaccaatcacccagttacttctctgaggttgcctgtttttgtttcataatacaatctttgttcttagttatgaatgcattttgttcattcctgtcttcaataatccctcattaagctagtcactttctgctccatgctaaaaaggaaaaattatcatgcaaatgtggcatgccatattaaaaagcacattaccaaacacttttgttgctgtccttcaattagtttcccttctttgaatttaattccatttgttgttaaactactgacttgatgtatggactcatgaatctgaggctgctgccaagaaagtggggaaaaaaaatcaaagcctcttcgaagagctgcagaggcgagctgaaatgaatttgcttcacctttgacaagaacacttgaacagcattggaatcctctgatgattcaacttggctaattatccaattatttatttcaagaataaaggcaccattttacaattaaggaagtgtaaagtagtctgagaaatttggtaatgacagatgacttaagtaacttctaagataaacagtatctgtgcaaaacttgtcccaccaattgttttcaggcagcagttggtgtgtcttagcatcagtgaaatcctgagtacactgaaggttttttgtttgtttgttttgctctttcaacagaaattattttacacttgtaaccaacatgtcaaatttccatggctcttaagcaatgtttaagttatatttctcttgattaaaagctttcggttcaaagcaatactttttaattgcctaatgatataagtcagttcttaggaaagaaccgcacatttaggagttcatttgcaatataactgaaaaattcattgcatggcagtaaaacaatttactgttaattacaaggagaagaatttgctgtagcatgctcgcagattgccatgaatcatgcagcactcctagagatttataacagatgtgtaaatgggatgaattagcagggtttaataacagagacacaaatcatgcagacttcaaggagctttaattgatatactagaatgtgacgggcatgaatcactcagccattcaacagcactgtaacatatggtcagctcaatatgccgcatcttaaatcggttggtgagtcgtaggttgtcccatatggtggaagcaatacatttttcatgattaaaaaaaagaatccattttttaaagaaatatgattgcaaagcatgttattgaacagtcttctgaatgccaaactgctttttttaaatgcttttttttttctttaacatggcagcttctcaaaataaataggggctactccttgtaataccagatcgctggaggcattataagaaccaaatcggtgcttgttggcacactcgatccacagcaagcctatagaaaagcgcagctgatgattgctgtgattgtcagggaaatccttcaggctggggcaaaacaaacaaatgaaaggatgatgtcactttcagagaagttcaggaatgcccagctttgtaaattgaagaaaatgagttggatgagagatccctgcttagcagggtaagaaagtggctgtgataaataataccatgacccctaaggtaacaattggatgtaacattttatactaacttcttaattaaatgctcagtcctacaggggcatgtgaaaagaagcactggctggtcatcacatagatggtagcaccaattccaagtcattcttgaagaattatttcagtatctgcaaacaggtaccctggttgaagactggtaactggtagtgtgcaaacatgtttttattggaactgggatctggcagcttttggaaaagcttttgctgcattagtaaatctgacagacttgaaaaaggaatattgcagccttagaactgtggctgccagaatttaatgtcaacaattaaaatttattttgatccttacctagtgtttattactgtttgtatacacaacagaccttactaatacagagatgcactattagatggaattaccatctgttcagagtgaaatgctggcatctgtcttagatgctaaaactaaaatgatattatttctaacaaaacaaaattaactgctttttactcaccaactttaatttgtagtgtgtagttgtatccaaggaaaaggcttgattttgaactatgtgatgacctctgtggccaggtctatatttagatatgcgactttatcaggggctctactggcctttttggcatatgaaaatggcatgtagaaatcacactttcaatacacaattatagcttcataatatactatgtatcctataagtcattaaaacaacacaaccaagctatgtaaaaattgactgaatcagagagactctactatgcaaaatattttgacagatacgccctaaaaaactgcaaggaaagaaattaaataggcaaaaaatcatctgaacaaagttgctataggtcccacagtgacatctttaggaaaatacaaactgtatctttcttctctgttagactattttaaattttctcccacatggacatatataaaaaatttacattcagtgccccctccttttaatttaaagcctaagtatcctattaaaataggtctttagcttttggaagttagagaatttggaggatcaaggacaatggtagtttccatactgatgttagatcagtgacgctactttctgagaagccagacttctattctatatatcacaaaataataaattgtgtcacaccagcatttaatgcatgtacacagtgcattaactgtaactgtagtacatttatttgtgctgcaggagacttgaaaatgatgaagaaatcgatactttgctgtcagagaagcaagtgttacgatgcatttaagtagttaattgcataagccccataaaagcttcaagtttgggtagcaaggatgccataattacagtctgagcaactaccttttattagtggtggactttagggaatggtggttgctgtcatcattgctgctatatgtgcagtttagaaataatggatcctcttctctcttcatgtgtaggatggtagttttgtgcaaattattgtgatcgccagaacaataactggttaaggtagtgtttgttcaccatgttcactgaacttctctaaaagcagggttttctttatgtcacagaacacatagacaaatcatatttgtatgccatgctaaggtaaaggaacaaggtggctgagagctgaaggggataaaccagaggggctcctgctggcttcccaggagcaaaggggatcaggatgtctggtacccattcgtggcttatgaacttagaagtactgttttaaattattcaaccaaagaattttgaaactggaagaggtcctagacataatcaagcctgtcactctaacaattgaagtaaccgaagaatagagagacctaataatggattaaccaatgttccataatcagggtcttaaagagccaatctagagcctacattttctcctttccagatcttctagtaatatcctctcctgaaggtgacttgtcaacaaagaagaaagtggcaaaatatattttattctttcttccctggtcagataatagacagtcaacaagatgatgctgagtcacccctgagagtttcgggggaaaacttttcctctttaagacactgattggtgagcagctgattctgcagcagtctctctgcaacagagaaatcagggctcatgacctggacttcttgtttgcgtcctggtccagtgcccttttgcaagtgttctggcctagcagtgtttggcaaattgtatttcctggcatagttttgcatttctgcgaaaaagtcaaaatcatattctattgacagggtgcttattaagaatgtcttatgtagtctgctccccacccacccctgaaacatagaaaaattgtttattcttaaattcttgtcatcatcatagaaagctgatgatgctttaagatattgacacagccatacagtcttcataggcaaaaaatgaacagattccttaaaaacaaatgaacagattccattttaaagaccagtacctcagaagagctttgttcagcttttagttcttatcctatggtgctcaaaatgctacactacataaattttgcaagtctaaatgtattcatttggatatactactaattatgttataaagtaataaatgctgcataaagaatgcatattataacattttataaaaatatctatacatcgaatagatagacaagaaattagattacccctattaaaaaatacaagtgctattttaaaagtacaagaattttgtacttttattcaaatagacattttattcttagaaatgatggataatgaacattcattttaaactttgtatattatccttagaaataatgaatattgaagattcgttttaaactttacatttacaagaattttctgggtaaatacagatagattttgaatatagatgaattgtattccttaatcatacataatttgaaagatttgttcttgtaatgatagcaccttatatttgtatagaaacttgttttctaaaacataaagcaaatatgtatattgttgtagaagcaattgttgtcaatgtatgtcactgaaaatgtatcctcatgttgcagatgggaaagtgggagcagatataaagggatttttctaagatcacacagatttagacattaaaaagtgaaatataatttttaaaagtctaccaaatccctttcattattcagtgttgtctcttaacgaactgttttgtaaattaacaaatctttaaaagtcatatctacttttacctatagttccttttccttgaaaatctgacgaataattcatcattaccccaatctcttggtgattctatgtgcatgtatgtgtgtgtgtttaatggttcagaagtatctatttttcttcttattctacttgtgtgtatgtgagaccagtctagtttaattgattgacaatttcacttaattcccccttccagccttagaagaactctgaaaagaataactcagtaggatgttcaccctttcaaacaggcttagttgactcctccatgtgaaactgtaaaacacacctactggaatgttttttgttttgtttttcttttaagcaagagaataaaaaatgtactctagttctattcattctcaggaattgacttctaaaggacagtcccattgctagatggaataattcctctgggaatcaagaagtgctctactacttaaagtttaaatggtaaacattaactttaatggactctcaagaatttccctattgattagaatcactttgccaaattaaaaaaaaagtgtgctctaattttcaataattattacacaaaaacgacagagttgccagaattccttttgtttagttttgtttcctattactcttaatctatattcctgtttaagacgtaatttttggattatgctactgatgggggaaggaatttgatttctgtggtggtgctgagcttcaacattatctccattgagttgagtggttggagtaaagtagagatgtatcaactttcaaacaaatgggacctggagaaaggctgctttcaaacagcaatgaaattcttcagcttttaagaagcataggaggcatattcatacttcttctcaacatttagttaaaatggaaatcctatcctcaacacaccaaatatgtataatttgtgatgctctgtctacatctttggtgtccagtatggtagtcatgaatcatatgtggctatttaaattcaaaatacagttaattaaaattaagaaatttgacattcagtttctcattctcactagctacatttcaagtgctcaatagtcttattataaggctagtggttaccgtattaaacattacagtcctagaacatttccttcattggagaaagttctattggacagtactggtaaagtagtttttggctattggatattactaggttagtagtttatgaaactaaaaagttcaggtttctgtgtcccaaaaccctagggaatctagcaaatttcaatttaaacattatgtaattggttctccattgcttccctgagcccaggactaaaaaatctttggcagctttcctttcctagttgagattatagccaagaatggcctgctaaaatcttaatacaaatatgtaactctaaactctgaagagagactctgggtgaagaaatttctgaatggcttagccttttattttgttttggattattttgaagtgagatcataacttgtagaatgaaatctttgagaacctaccatttaactgatttttagcagaaaaaaatgctaagagaaattatgcatataattcacagattcatacatatataaaaataaaatatcacatgggctgcagtggcagaaaataaccagaattgttaattatccttctaacttgatgaactttttgctcagtgccttttcttttttactaaaagttaaaatagaaccaaaatgaattgtttctttttgaaaagctggccgaaggtctaaaaagtaacaaatactaattgttctaagctgctttacggtgaatttcctttcatggtttaagggcttcaattcttatatccacatcattttgatttatatttattgaaacaggcaatgactttgcgtctgtgtatggctgtgttaacacaggtgtaaattgaaagtccacagatgtagtttgggcccttaataaataggctcggtgattatgacatttgttcctttctccacattcacctctcaaatccagcagacatacttaaagggggaataaatctcagctcacaaactcaactgtttaagggaaaaaaaaatcaaaccaaaacaaaccttcattttcaataaatcagctgttaatctgaatgagcaagttgtagggaaaaccttaatctccgtgactcctagggtttcccaggaaccttcaaagaattgccagtgtcccaccacctgaaaggatggcaaggtcccagtgtatgcaagggcatgaggtcactactgctccaaggctaagcccactgctggtggtggggtcacttcagggccagggtgctctctaggaccaagaggctgaccaaagttagttgcctggaccgttgtgtgtaaactgctgaactcacaggcttgttattttgtgctgatgctctgtttaacattcagagtgctattgcttgtttgctttcatttagatcagtttttaagctttaaaaatagaaaatagcgtataaaaggagcttttttgaccaaagaagatatacagatggcaaatacacatatgaaaaatgttctatatcatatgtcataaagggaaatgcaaattaaaataagataccactacacacccattagaatggccaaaatctggaacactgacaacaccaaatgctgatgaggctgtacagtagaaggaatgctcattcattgccagtgggaatgcaaaatggtacagccactttggaagacagtttggcagtgtcttgaaaaccaaacatgctcttaccatatgatacagcaattgcacttcttggtatttactcaacggagttaaaaacacaaaaccctgatatataattagatgtacacatatatatgcacatcatagcagctttattcacaattgccaaaacttggaaacaaccaggatatttcatcagtagatgaatgaataaataaactgtgataaactatgctacatccagacaagggaatattatttagcattaaatgagctagcaaatgatgaaaagacatgaaggaaacttaaatgcatattactcagtgaaaggtcagtctacaaaggctacatgctttatgattccaactatatgactttctggaaaaggcaaaactacggagatgagtagttacctggggttggggggaaggagagatgaataggcagggcacagaggatgttttgggtagggaaaattttctgtgtaatagcataatgatggatgcatgccatcatacatttgtccaaacccagagaaggtaaacaccacgtgtgagccccaatggaaactatgtactttgaatgaaaatgatgtgtcaatgcagatttatctactgtagcaaatgaaccatttgggtgccggatgttgatattggaagagactgtgcatgggtggggagatatggtagaactctgtaccttcttctcaatttttctatgaacataaaacttctcttaaaaattaagtctactgggcgtagtggcacctgtctgtagtcccagctacttgggaggctgagacaggaagattgcttgagcccaggagttccaggctgtagtgagctatcattatgcctgtgcatagccactgcactccagcctgggcaacaatgtgagactccatctctaaaaaaaaaaataaataaaggttacccctggcacattgcctatggtgtagccgtgctccacaggagcaatcaaaaacaaaaataatgaaagtctttttaaaaatgactttctgatgtatttttacacaagcacaaagttttggcaaactcgtgttaatattccttcattacccattggttggcacggattatgctttgcctgtgtaaattacagcacggagttgatgcctctttaaggcaaggggctctgccctatgggtttagtgctagtcattggctgtaggtttcactgcgggatcctgtggctcctgggtgaggcagctcttactcagccaagggaagttctacgcagaagggggcagccatgagccatcagaaaccaacgggcacagaaactgggccattggggtacctgcttggtagagggactgtggttggggcaccacccagagtacagcagctactataatatataagatctattatttagctaaaaagaatagagaagttattttcaagaaaaaatttaatttgaaagttttgtgtgtagtatattggccatttaaattttgtttcactgcatttaagataaactctatattgtgttttcagttcctagagccatacagatacttgaaaccacaactgatttgatttgaagtgtgatatatacaaatacatatatacgtatatgtgaatatgtgtgtctagagacagaaaccaaattcttgaatataacaggtgttttctaatatttagcaccagcacaactgaggccacctctggttaaaggaatcaacagcacaacaatccatcttaggtggtttccacctgaagaactgaatggaccctctcctatatatcagctggaaaggagagagtcatctctaccagctctgatgaccacgatgatgaaaggaatccgtttcataggaaatgggtattgtaaatttcccagctccactcacccagtcaatacagacttcactggtaagtgtgtttgacattgctttatttaggagacacgaagctccaaaatgttttctatattttcatatccctttacaatgaatttttattatacctacttagagaaatactaattcagccctttgatagcttttgcctgattgtttcagcatgtccatctttttagaattctggggaaaaaagtcaggtaagtgaaggaaaggaaaaataaaagatgaagatgaagaagcagccttattggatcaaagtatgtgctttgtatttgtctttttgtgaagtatgtgccaggacatgtttcttgaaatattattcactgtgttctctgagcaaatgagtttgcaaaatgccctcatgctattggagattctcagtatgcaccccgttactgaaactccaaaaagcattgtaagaaagctattcaactttgcttagctaatcatgcctaacagatatttgatgtaatgttttctttttctttctcttgctgtttccttcttctttttttcactgtgacaacttaatatctcatgttctatgaagaacattgtggggaaaactaatcccagggaaaagataacttctctaagccaggactatggtaaagcaagtgaggctcttgtttcggtcacaaaatttaaaggcactaaaaaactcagtgttaatgtaaattttaatgcaatatttttaaaaatgaaaatcaatgtgaaagcactataaaaatattatcaaaagcttaaataaagacagattgaactctgtaccagcacaatcctgcctcactggccttaccctcctcctggccttactagtaccgcaatattttggaagtcccatgacctctgtgacttacagcttctaatagcatgatttcaatatagctgtaaaaaaactctacttatggtacaccatttttccaatttttaaaaaaatttacaaagtataagatatatattattatgtaaactcataaagatgttcatttaatcatccatgagaaagtcattttggagcaaatagctagtctttaaaatattgcatatgtgaagacaatgaaatggaattcgagctataaaaatttgtattgttttatttttacttaaaatagtaaatagtttgcttttcattgagactggctgctgatgcaccttggtaatgaatcatgattatattctaactgagatatattgagattaatgcatgattaactactctctcagtacatcaaaatcattgcagagtattagaaattgaaccattgagctaaaaatgctcaacttctgctttatattcttaaaatggcaaaaaagaaaagaaaaaaaaggtaaggaaaaggaatacatgaataatagtaaaactcttttctcaaatgaaaatggaaactacctccctgatccaatatttggcttgagatgtgtttcttccaagaaatagcatccgtttccattcagctgggcatagctgctgcaaggatgtcagcttggatttgcaggctagccagcagacagatttttgatgggatcacctactgttgttgcagtgaaagatagaatggcccgtccaccgttaataaatttggtcatcctcgctatctcccttgctggccttatactctgaggtgcaagggctaggggcagatgcagtgtctgggaagttttccaaattcctctttaaaaaagttaggctgtaaacactggcctcactaagcaggatccttctgtctataacaaagcctccagctgcacagaaaatatgcttggagtacacaccatttgaaggacaaggcagggagatcacaattttggcttgaactactccctggagctttggtgattcctggagaatgagaagttcttctgtgttcaggcatgttctgggacattgctgatgccctttttagtggtagcttggctttacttttaagacccctttaacttttaatataaccatgtatatactaagttattggtttgatcctttggctgacttgccaggtttggctgaatgattttattgagttgtaccgaagcctaactaaatgtacccaattaatgagctaggacaggttttcaaaaccaactcaataactttctgtaaacttgcatctttcctaaatagagaggtaagcatataattagcatcttacattattcttactgatatattatcctatttaatccctctgcaaccctataaagtagctctttttaccctcgtagtacaggaggaaaagaggctccagtgagtgacttgcccattgtgccacagctattgaatttcagggtggaaacgtgaattggagccttccaaatttaaaggcaaggtctctgctacagggtggaaaggaacttttgtagactgttctttggaagtgatagaataggaagtatacaaaagtaagaaagagggataggaggtgaaataattatcacccaaatattccttatctgacactgctaaactttttggatttgtctttcagttagtttcagctcacaaacagcaagtagtgttggcattatttattcatttatttgtatccccaaagacatgtaggcatcaggtttttttttaatagcaattaaacccagagtgttactagaagctagatgtttaaaatataaataacattatgtgaaatgggctgaagtgttatgcgttaaaacagtgctttcaactcacattcctttatatttcattcagtttttatattctgaggcaaatttaatgagcaaatccttgaaacctctaatatgatgaattacattttaaaagttaataactttaagataaactaagatgtcctttgttttgaattattcaattcaaaatctcaaacttcaactaaaatgacttctgaatagaaatatcaattagtactcaaatacaaatataaggttgatgtacataattatacatattttatatatgaaaagataagttagattgtacccatcaatgacaggaattataaacgcattcataacacatttcatggccatgaacattatgttgcaagtctcagtaagaaatatctcattattgtagtacaagaaagggatctcttacacaacttatgcctctttcatatttgctttaaatatttttatcttacacaatagaaagagaataattcaagcatatgaatatatgtcctaaaatgttgtttaatattgtaaattaccaagcttaatactgtaaataaaccctgtcaatatctacctttgggcagaataaagaaccagataaagctattttgggacctatttttgcttccttttcttttctgatacaagtgttcttttaaaaaatctaatcttcaggaagaatgtattatcagtcatttacatcatagtttaaatttaaaataattaactctctgtatattattatgaggacttcgaagaagattaactgataaattactttcaaatccaggccccattatttattagctaaatgtaattagacaactcatttaatcattttttgtgcttctgtttccttttctttaaaattaacataattccactgacagtattggtatctagcaggtaggtgaggatttaaagtagatagcccacctaatgaactttgcacagtgcctaccacacagattatttagtactcattaaacattagctattagttattattcatttaataaatatttattaagtgcctactatgagacaggagctttcctaagtgagagtattctgcagttataaaatcagcattctattaatttatttgctgttacacatgcaaaatatgtttgctcaaatgttatatctagggcatgagtaatatgcaatattccatattaaaatgtgatacttaattttgctattgaaaatagtaaaattaattgacttagtggtgaggacttgggcaaactacttttctgagtgtctaatcttgctcatctattaaattgaggattttgttgcatgatcaatgttctaacctctaaaattccaattctgtgaacatagaatgtttaggaggccccacaatccaaaatacaggctgtaatcatggcatctgtgagttaaaaaaacacctagagtttaaaataaattgttttctataatattttgtttattaatacaatttaagattgatacaaatttactgcttttctctaataatttaagaaatttagtgatatgggcagagttcaacataaaatagatattcaattattgggtcatatcagatgttataaaaaaagcagaaaattaaaatagtttcgtgatcttgtaattgggcaatgatataaacaatcatggtgaaacagtgccccagttacatggggttaaaaatactttcttcttccaacacagaaatagcaaatagagcctcccctcccatatgcaactagaaggggatatcattgtgcctttggagagaaaaaaaaatcatgctcgtttttttcaggaatgcagagtaaatctacttgatttatacaaagaatttagttctttccttgtaatgctagtaatccaagtggaacctggtaaaaacagcaagtaaaatactgctcagattggcattccaaaggtgaccctctttctccttgtcacttattttttcctattagcgaaaacaggtccatgatcatttgggggaaggtttgactattgtagtatccagatgccaatcacaccagccttttaaactgcctttactggtgaccctgcccagaaatcaggaactgcctttggggagatctttgtagcaaaccactggggagatgagcacacacatgcacctggatataattcccttttatttgtcttcacgagaaatgtgattactgatgttgaatatcttgcagatgagaactctatacagtttcttcataataatgatgttcaaggacactaaatgattgtcatacatttttgtatcatagtattcaccttcccaaaaatggttgaactaaaatgctttagaatacgaaatgcaattaattaccaagggatgaaaaaagaaatgcaaccaccaaaaatcaatatgtttaagagcatattctttatttcttttactccataatatttatgccttattgttattagtcttcttatttttagtgaattgggacatttaagcacttcattaaaagaaagctgattataagcatttatagtgaaggtgcaagtagggcaaacttcttcagatagactaattagtaaaagcatattaattctgaccttcaacacccttggtgtcccactatttgttttccttggagtgggagcaagtattttgacagaaagcgcttgaaaaaaataaaaaacaaaacaactaaacaaaaccccagttcttttcaagacagatttaaatcacaaattttacctaacctttgatgttagatttcagccctagttattgaaaaacaaatataataatctactatgtgtcctagaagtttaatgaacaggcagtaattatactaaaaaagtaaaggaaagagtaagaacatggtatgtggcagcaaagtaaaggagaaataattctcaggcagtgacaaaactctgctgtgttttctgattatgaaacaatcagaagagatgagaatggttgagttaatcagtttggactgaggacaaggatcaaaatgcatatcttcttagaataacagaagtcacactgactcatgataactagagatatggagatgtaaatgtcaagactgtttattttttattatatttagtagagaggtataagtaagttctcaggaaatgccttcaggtggcattgatggcactgcgagatgggagaggaccattatttccccattcatcaactacatcataagaccaatttaagaatgcatgtgttttaacccttgccttttaaaagtgacttattttgaagtacattcctgtaagtctcccttttttttgaaatattaatgttaggtaactggtaagctgagccaacactgaaaacaaactgtttttgttagctgttagcagtattttagttaacttaaagcatctgtttttgtccatcactgttaaaatttttcaaaatgcattgtcacctgatatataaaccacacgtgtgttcctatatactcatcccacatgcataaacatatgttttccagaaggtctctgggttttccgcaaccactcaatgggttctccttgcccactgcctagacagagccagtttatcaagacaggggaattgcaatagagaaagagtttaattcacatagagcctgctgtatgggaaacttgagttttattattactgaaatcagtctcttggagagtttggggatcagagtttttaagagtaatttggctggtaaggggttgggaagtgggagtgctgattggttgggtcggacatgaaatcctagggagtcaaagctgtcctcttgtggtgagtcagttcctgggtgaggaccacaagatcagatgagccagtttatcaatctgggtggtgatagctatttcatgagttaagggactgcaaaatatctcaaacactgatcttaaattttccaacagtgatgttatccccaggagcaatttggggaggttcggaatcttgcagctggaggctgcacggcttctaaaccatcattccttatcttgtagcaaatttgttagtcatacaaaggcagacaggtccccaggcaagaagggggtctatttagggaaaaggctgttaccatctttgtttcaaaactaaattgtaaactaaattttttcccaaggttaggtcaacctttgcccagcagtgaacaaggacatattagagtttataagtaagatagagttatttaggccaggtctctttcactgtcataattttcttagttataatttttgcaaagtcattttcatttctatatagtctcaaatatacctgctcaaattgtccagtgtcttttctgccagtatgttggcattttggaatcttttcaaagacttcattgcttaaaaaaaatgctgttgcttaatgatattttgtatcaatataacacattaattttaatttccccttcattcagcttaaatgggttggaaaaggaactttgagcagaaaaagaatcataattggtcagcaatggtagtgaaactagcacctttgaagatgattgatttttgatttagtaagatgaattattttgtgtatgttttcttgaaaaaaattagttaaaacatttaaaaatgtatagttatagttattttataccagttacagcactcttgaagtgtatagattaagttcctttctattcagatagagaggaatctgggaacatcattgtcaaaatgccatctctttcaaaacttggttccagtgctctaaagaaatgttttagaagattatgcactaatgttactggcggcaaattcatatagatctgtagccacctcaatttttgcattctcagaagaaagaatttgattgaggggacataaggcatattaagagaccaagacaaattttagagcaagagtgaaaatttatttaaaaattttagagcaggaatgaaaggaaataaagtatacttggaagagggccaagtgggtgacttgagagatgatttgacctttacttggggttttatataatggcatgcttccgaggtcttgcgtcccttctcccctgattcttcccttggggtgggctgtccacgtgtacagtagtctgccagcaattgggagaagttgaatgtccagtgtgtttactgaagttataggcatgctcacttaaggcatgtttccttgccagttaagtgttcccagaaggtcatataccggttaagcgccaacattttgcctcttagtgcgcatgcttgagcccactcacccatctcctgagatctcattgggaagctgctgatcacccgtctcaggtgtttctatctatagggagactgcctttccctggcactggctgtgactgattcttattattttagagagatagtgtaacaattatcacctgacggttgcctgacatttctggtggggcgttgtggggggcggtgcttctctgaccctgcccatagtctaactgccaactgtaacactaacagtttcattgaagtgggggaaatgttaagtaataatatgaaaaccatatttaaggtatatatatataaggaggctcacaaacatagccataggccgtttgtttggagctttgaaaagggaggctcagttccttgactgatgagcagtttccatttggaaattctttgactttagtgcaacttcaaaataaaggcatgagacagaaggagagaggaagaaaccctcaagccatctaaagtcatctctggcaatggtggccatatcattttcacaaaaaaggggcatccttggggaatatcataaaggaagaataaggacttaagggaaatgtgtgggaatgattgactgatcctccctccagcagaaaattaaaaatcaatgtagatgcatttttctcagcttcttcccttcatttttttcctctcctgaaacctgttcctccttccgtgtgtaccatctacagtgaatatcactattgccttaggcggaaaccttggaactctccttgaattggcacttgaactattcactcatttcctcccattctattaatgattcctcctctggccgttcttcctcggatacatctcttggaactacctgctggtcctacgctactgcctagtccagacctatgttgtgggcttctctgccaacagtttcaatcttctccaggctgttcttcaaacgaattatttttattggcattctcttgtgtaaaaccttttaatggtttcccagcgagagatgcccttcacaaacccttttctgcttacctgctttctacctatatacctcctcatctctcccaccaaggactggtatactctctagctctagaccattttttagtcccagtgcttgaatatagcacactctctcagatgcccatctctttgaacatattgatacctttgccgggtatgccctcatctatttgcaagtacttcgctttcctttcacctggctaattgctactcatcatgaaagggttagcttagctgttcccctaaataaacttccagcaaccccagcctcctcccatgccaaatctgggttgaggacctctcttatgtactactatagaaaccaacaattactctattttagctcttaccgcattctattaagacaggttgttcagggagctaagctatgaggacgcaaaggcataacgatgatacaatggactttggggactcaggggaaagtgtgggatggggtgagggataaaaaaaactacacattgggtacagtgtacactgttcaggtgatgtgtgtaccaaaatctcagaaatcaacactaaagaacgtattcatataaccaaatactgcctgttcccaaaaacacctgttgaaaaaaaaaaaaaactggttgtttgcttatctatgtttcatgtagactgaaattatgactatctttttcatgcttaacacatttgtgtcttgcacggcataagacatttaccagatactcaataaatatttattaactaaatgagtgatagaaaagagggaaatccaaaagatggatcacttagctgtaagaattatttaatggcaaaattcattatgcttttgaatatagttcacatttttaaatccacgtttttgaaagtattgatggtttagagtgataactcaatttgtttagtctctattggccttagatgtgtaagaaaatacattttaaactgtatagtaccagagacaaaaagaaatttcttgttaatggtcctcagttgctggcaaagttacttgtacaccagttgttatagctagagtgttatatcagaaattgttttctgccccaccatagctatcacattgtgttgctgaaaactaggtggttgcacatctcttagatacatgatctccttaggcttattaaattttgaggttaatgaatattttgacacttttacctatacatatcattagggcttattgcaataggtttaagatgacagtcataataaacatatacagtacaataaaaagcacttttaatcttgaaagtgctttaaaaacaacagtgatcaatgctatggatggattaacagcatcatgctgattgaattctatttcaaggacaatggaggtattgatgttggcagtctagttcagaaagtggcaatggctgtagtaaatggtgcaggttctggagtcagactccccaggtttcaaatctggctccccaacatgctggtgtgcgactttgcacaagtcattcccccagtgtgaaactcagtttcttcatctgttaaatggcttattgtaaggtttcaatgcaatcactgtaaaggattagtacacagtgtcttagtattgtgtatgcatttgtgaccagcattctgtaattctggacttcaattatgtgcctttccattgcatacatatattttatgtccctaagtcacataaatcttgttgatacttctttatgacctctctctactacacggtactctgatcattcactttattttactcattctgtgaacctctgacctgttttttgttgtcattgttacctttcttcttccactagaagcatacatgttctgcatctcatttctccacatctatttaaacagccaactttaaatgttatgtgtacttataaacctaactctattattccccctgtcttcataatcagtcttctcgaaaactaagactctctatgtgtcattttctcatggatcaattactcctcaatctactgtcatttggattcttttcttccacttctttattgtaaatactttcttctagattatcaatagttttcaagtcagagaactttccttaatcctcaccctatgtgccaataaataatattggtgccattttttccttttaaaaaataagaagaaactaaatatttctcactaggtttctccttctattttccctaaactgtgtttcaagctttgatattgctttctacatccacctttaaatggaagagttcaatcactcattcggttcgtatgcagtttttccttatttcactccactagctgatgttatgattgctgtcgtaaaaaggatactgagcaacacaagaatgattcctaaccttagggagcttaaagtcttgcagtgaaatcatgcatcaaacatgtaattaagtaattacaagtgacttctgtctccagctatgaagcatatcaaaaaatcctcctgctgagaaaagaaatagaagctggaaaaaatttctcaaaaatatggttaaagacataagtgagtaacaaaggcttctaggacttgtgggatcaagatcctagatataagaaaaaccatgtaggtgagccttttaaattatctttgtttttccttctgttttgtttgttaattcctctattgcatagtcttagggaaaaaaaaaagacaggcaaaaaattagagtctaggtggggtcctggtatacatgccaggttttcaattgaaatcctagaagagcaaatcattaataggctcttcttcctcagataaagcctcaattattcttaactactaattatactgagataaaagttatttttttaccaaaaatatttagatatttgctgaaagatcacatcaaccagagtcccagagtgtgcaattttttcctatacaatgtcgggcattcaatcaaatattaacaggcataccagaaaatagggccaaataaccaaaagataagataaataaaataaaaaatagaaacatatcctcaagtaattcagatatatggaaatatgtatttgcatacacacataggcatatacacacatatacatgtagatatatatgcatatatccagacacagactttaaaataactataattaatattatcaataaaatcaatgaaaatgttcagaatttaagtagcaaatgggaatatattagaataggaattttagagcggagtaacagctgaagttagcaactcagtagataaaataccaattccatccctgataaagtaaatagccttgttcttaatatcgtatgcaacaatgtaagttgggaacaaaatatatatgaaacacctatttgtagccaatatatagcaacagtgcagagctattatgcttaagtgaagaaaagcaaatgaactgagttgcacacacctggaattattgagctcaagcagagacattagtatatctggtaaaggaataaaaactggaattcagggctacaaaagtagatttggagggtaggttcccagagagaagattgatgctgaaaaataattcaaaaattctgtgtaacaattcttttttgggtgcttggccaacatttagaataatcctatgagaaacatagtagagaagatctgcttggtagttggagctaagtagagatttcacaggcaacatagagctaaggatgcacacatggagtttggacttaaccacagtagagaaaccttggtgaatactctgagctttcactcgactctccaaaagtccgtcctttatgagtaaattcccatgctttaggaataagggctattctttaggaacattgagataattgaaacagattcaccctagtgaagcctaaagccaaggctgagtaaggtcgaggtaatctggtaattttacttcccgtcaaaacagaattttgtattcattagtaaaaggtaaaataatccagaggttttactatgcgtcatccatgaagtgaccaataatgaaatgttaatagtcgatagaggcagacaaagacttcaaaataacttcagttaatgttaagagaaaataaaggacaaggtggacagaaaggatgataagataaaaaatatttcaatgcaaaattgaaatctgtacagtaattaataggaaaaaatggtatgtaaagtaaaatacctgaaatgaagagaatattgataagttttgccaatgaaacattgcagaaggcaagattagagaactcaacggtcaattgtaattgtccaaactgaagcatatcgagaaggaaatgaaaacatgaaaaaaagaacaatgaggtatttgaggacccagaaggaaagagtgaaagaatgagacaatagtaatattgtagaatagccaaatattatcaaatatgaaaaataagttcacacatagtttaacaaagtttagcaaaccataaggagggcaaatataaggaaagccatatccaggtatattacagtcaaattgcttaaaataaaagacaaagaaaaaccttcaaaagcacctggggagggtggggagacttattaccttcagtggagcaaaaataagaatgatgtctgagttttcaacaacaacaataaatgaatgccagaatataatggaatgatactttttaaatgctaaaattatttttttaacaataataacaacaaaagaaaactaccagtcaagatttctgtacccaggaaacatatccatcaaaaatgataaaataaaatatttttcttaacaaaagagttgaaaaaagttatcatcaaaagactggcattataaaaatcataaagtgtattaggacataggaaaagatcccaaaaggaagcacagagctgcaggaaagagtgcaaacctctagaaatggtaactaggtgtgtaaataaaaagtaatatttatgataaaaggcataaaaatcatactttgaagttgataacatgtaagaaaaaatgtatgacatcaattattttgtcacaaatgatgacggggtctatatggagctaaactgtggtaaaattcctaaaaagttatggaagttgaagaattaataatatgaagtaggccatagtagatcaaggattcagattatgatgccaaaggtaacaaccaaaagaatgatttagaaaattaatgtaaggaaacactaaatgttaaataaacacaggttaagctgataaaggagtttgagggtggcaagaagaagccagaaacaaagagcaaatgtggggaataaaaggacaaataccactgtggtgaacataaactcaactatatcagtagttgcattaaatctaaatagtctacccaaataagcataaaagttctcagattgatttaaaaaataaaaatatatgttgtttattcttataaacatactttaaatataaagacaaaattcgaaaacaaagaaagagataagatgtattgatatatagatagattttaagacaataaatgttagtagacaaaatggaggacatttcataatgacaaaaagatcaattcaatagagggacatataatcctaaatttaggtgctacttatagtttcagatatgtatataaaactgaagttgacagaaataaacagagaataaatatatcctcatagttgaagatataaatccccatctaatattttgacaggaaaagtacacaaaatattagtataactatcaaagatttgaaaatgaataaacaattacatctgtatataaaacatgtgacattttataagtgttgtcatatgtagaacatcacttccaacaactatataatatgcatttttgaggaacacataggacattttccaaatagttaatatcctgggctatagaaatcgcataatttttttttttaagagacgaggtcttactgtgttgctcaggctggtcttgaacccctgggctcaagcagtcttcccacttcagtctcccaaagtgttaggattacagatgtgatgagccactgcattcagcttgatctcataatatttcaagttctctgacaactgtgagattaaactagaactccaaatctaaaacataatccgattggaaaatatccctggctcaaaaagaaattatggaaattaaaaattatttttatctaatgataataatgccttaatacatataaaaacattgtaggatggacaatatcaggaatctgatattgctttatagctttaaatgcatatattagaaaaagggaatagttaacaatcaattagcttcccactcaagaagaaaccaggaaattaaagcagcatatgacacccaaaaaatatttgaataaaagaaattataaaaataagagaaatcaatgatatagcaaacagaaatgtaatggagaaaataagaccaagaattgattctagaaaatttggggaaaaatttctttgcaagtgatcaaggaaaggagaaagtacagattactactctcagggatgcaaagagccattactagaaatcttacagacattaaaaaaaataataatgtattaagaacagcactacgctaaaaccttgacaatacaggcaaaatacagagatcctttgcatgggagaaaaatctccaaatttaaactgacacaagaagatctagaaaatctatgtggtcctagatgtgttttaaaaatgaaatctatagttaagtcttttacataaagaaaaccccagggaaggtggcccgattggtggatttcatcaaacaattacagtagaaataatagcaatcctacaaaaaaactcttacagaaaatagaaaattgcaatggtttctatctcattttatgaggtcagaagaacttatacactaaaatctgacaaagaaattaacataaaggaaaacacaggtcaataataatcacaaaagtagattctaatattctctgtgtgtgtgtgtgtgtgtgtgtgtgtgtgtgtgtacataaataaaatgttatatcatgaccatgcaggttttattccagtagtgtgtaatcttttcaaaatgtatgtgattcaacacattaacatagtaaaaatgaaacattctaaattatcaccacagatttaacaaatgcatttaataaaatataataactattcataacaattctcagcaaactagtaatgaaagaacacatcctaataaattgtttttgtaaaagacctctaatagtaaaatatcaagtgctttttcccagaggtcaggtacaggacaaggaaattcactatcaccacttttatttaatgttgtactggaagtatagtactagccagagcaatatagcaataaaataaataagtattaggtatgtcaaagaagaagtaaaccatctttatttgtagatgtcattatttttattgatgtcaaaataatatataaactattcagtttactcagtaaacttagaaaagtgtcgaataaaggtcaatgtacagaaatcaaatgtttctattgaatagcaaaaaacaagtagaaaatgaaatgtttaaaagtaccatgcttactagaactaacacacataaatgacttagaaacaagtctgctaaaaggtaatgtaggacctccactctgaaaactacaaaaaattactgtgagaaattaaagaccaaataaatggaaagttacgccatgttcatggatctaaacacttaatattgttaaatagcaagtcttcctagtttgatctgtagaatccatatagtccctctcaaaatcccaggatttctgtaaaaatttacaagctaattttaatatgcacatgagagaggaaagtacttagagtagccaaggcaatactaaaaaagggcaaagtaggaaggcttatgtatcaagactaactataagactgcagtaggtaagcatgtatagtataggcaaaagaacagataagtatagtaataacatattgccacataaataccccaaataaatacatatatatgcagggcacagtggctcacacctgtaattccagcactttgagaggccaaggcaagagtattgcttgtgctcaggagttcaagactagcctgggtgacatagtgagacctcatctctacaaaaagctgaaaaattagctgggcatggtgaggcacctgtagtcccagttactcaggaggctgaggtaagagaatctcttgaacccaagagttcaaggctgcggtgagccttgattgcaccactgcactccagcctgggtgacagagcaagatcctgtctctaaaaaataataataatacatacatacatatgtgctctaaaaagcacatgcaaagttgttcatagcaactttatttctaataatcaaaaactggtaacaatccaaatttctatcaacagtagaatggataataaattataataaatttattcagtggactgcatatagaaataaaaatgagccaactattgcttcagagaacaatgtgggtgaatcttataacctgttagtgagtaaaagaagctagaatctaaagagtctagtattctatttatataaatttcttctttttcattttaacatttattttaggtataatgggtacaacatgcgggtttgttacttggctatattgcatgacgctaacgtttgggctatgggttccattacgcaagtagtgagcgtggtatccaataggtagtttttccaattacagtcccctccctcccttccagtgtctgttgttctcatgtttatgtccatgtgtgctcaatgtttagctctcacatataaatgaatatgtagtatttggttattgttccagcattaattcacttagaattatgaactccaactgcatccatgttgctgtaaaggaaatgattttgttcttttttgtgattgggtagtattccatggtgtatatgtaccacattttctttatccagtccatcattgatgggcacctagattgattctgtgtctttgctattgtgattagtgtagcaatgaacatatgagtgcatgcgtctttttggtagaatgatttatttttctttgggtataacaggattgctgtgtcaaatggtagctctgttttaagttctttgagaaatctccagactgctttccacagtggctgaactaatttacatttccaccaatcgtgcataagcattctctcttttccacagccttaccagcatctgctgttttttgactttttaataataaacattctgactagtgtgagatggtatctcattgttgttttgatttccatttctctgacaattattgatgctgcacattttttcatgtttgttggttgcttgtatgtcatcttctgtgaagtgtatgtttggctgggcgcggtggctcacacctgtaatccagcactttgggaggccgaggtgggtggatcacgaggtcaagagatcgagaccatcctggtcaacatggtgaaaccctgtctctactaaaaatacaaaaattagctgggcatggtggtgtgtgcctgtaatcccagctactcaggaggctgaggcaggagaatcacttgaacccaggaggcaggggttgcagtgagccaagatggcaccactgcactccagcctggcaacagagcaaaactccgtctcaaaaaaaaaaaaaagagatagaagtatgtgttcatgttctttcccattttttaaatggagttgtttttcttttgttgatttgtttaagttccttataggttctgcatattagaactttgtcagatgcataatttgtatattctgtaggctgtctgtttactctgtggatagtttcttttggtgtgtgtgcagagacactttagtttaattaggtctcagttgtccatttctaaagctgcaaagtgaaatcagtggtgacagaaatcagtagatggggtaataactgaaaggaagcaaaaagaagccctctgagattctggaattattttataaattagtctgagaggagtttataagtgtagatttattttgtaaatgtccatcaaaatataccttgataattagtgcactttatttttgttatactttactttgaaaagttactgaataaatgtttcaagcctgcaaagtccaaaaataagatgtgaaaaaatactgtaacataacagaagcactcaacccagtctagaggattagtgaagacctctccgaggatgaggcaagttgagttagctaggccaaaaaaaaaaaaaaaaagaaaaaaaaaagaaagaaagaaagaaaaagaaagaaggaaagtaaaggagtccaggtagagaaagtatcatgtatcaatgtcttaatgtgggagatgacatgtacataaataaacaaattagtaagcaagaaaaacttggaaattctaatataaattagattcttgccagaagggtgcatggtgaggctgaaataaaaaaggggccagatcatgcaagggccatcacattgaaaattttgaacgtaattttattcatctttataagaccactgtggaggttacagcctgataccaagaatgtttttaagaagggcatgctgatattttcactgatattgtacatgtaccattcatagattgactcactaaaagttgcaattttatttaatcatctaataagattatttatagaatgtctgcaaaatgttagaagatcttccttataagaattagcatagctgaatggtttaaaaaaaaatgaaattctgaatcccagcatggatctattgcattcttgcaattgtccaaggcaaaaggttctgcttgcctgcttcataaacaaaatcaattaaccgagactgcagcattgcagtaaaaagtttaatttaagccaagccagccaagtggaagaactggagttatcactcaaatcagtctctctgaagtcttgaaggttaggatttttatggataatttagtgggcagaggggctagggaatgggtgctgctgataagttgaagatgaaatcataagagcatggaaaatggtcctcctgtattaagtctgtctctgggtggggcaacaggatgggttgagtcatgagtcattagtccaggtgggatcagtttgaaaaacatctcaaaaaagcaatcttgggttttacaatagtgatgttatctataggagcaattggggaagtcaccaatcttgtgacctctgaccacattattcctgaacagtaagcaattataaaaattacacctacattttagcagcattcaggcccctcccgtaatcctattcttgtggcctttcattagtcttatgaaggtggtttttagtctctgagaagggaggaggttagttttagggagggatgatcatctatgatcatctttgctttcaagttaaactatgaactaaatttctcccagtgtccaggaatggccaaagacagcttgaaggttagaagcaagatggagtcaactatgtcagatttctcttactgtcgtaattttgtaaaatcagtttcatcctaatctctggagaagtacctagaaatttgcatttggataagatatacagatctacactattaaagacagagctatcttacccacccccaccccagctatttgtctaagggaaatgaaacaatttgtacatacaaaaggctggcacacacatacgcattgcgcctacattcacaagagccagaaactggaaacaactcaaatatccatcagtaggtgaattgattaataaaatgtggtatatgtatgtgatgaaatactagtaagcaatacaaaggaaagagcagaagaacacttaatcgtaattccacttatataaaattcttaataataattaatgtatagtgacaaaaaggagatcagcagttgcctaggcctgaggaggagggggtgatggaaatgctgtgtaacaatcaaggtagtggttttacaagtgtgtacatctgtcaaaacatatcgaactgaaccatttaaacagatgtgcttcagtatatatgtaaatttttatctcactaaaattaataaaatattctccaagtgattcttgcaacattcaagtatgggaaccattgatttacactgtaatgaacaagttgctttaactttgtttggaaaccaaacaattttaatattattttaccatttaaattctgagctctttcagatagaaacttaagcagtgtgtatactgcttatcactccaaatttcacctgaaacaaattggtatatactgtttgtcataaaaataagaaaatgactttcattaaattatgctgacaatgagaatcttgtacaatttcaatgaaataactttttttaatgaaatagggtttcttttgatctcattcacattcagaagggaatttttgtaaatagaaaggactatattttattttatcctaagaaggaatttagtcagtaaaaatatgaaatagacacttgagtatacagttgaccagttattgccttgaagctactgcacctctgtaatgtatttttcatagcttatataatccgtgttaatatgctacattattaagttcaactgtgagaaatatagttgcttgaaaacagatttcttctgcatacttataaattcagtagttggaaaaaaattaaagaaatataattaaagattgcaaaatcaatttgaccctcacttaaaatgtgttgagtggaggcagcaagcagcagcctacatctgatgctgttctctccttgtttacttcacaaaactgtgcaaattagaactttaatttacagagctgttaaagcctcattaaaaactttcagcaagtatcctattttgagggtttttttccccttatatctaatatgcagcattatctctgttttgtgggcatgtatgaggcaatatctataggcatattaatgtaaactgcatatatgaaatgaaagtttttcacatggaaaggacactagtggtgtctgtcaattgcttcccaaagtgattaatttctccatttacttggtgtttattggcatctactaacactggatctctgttggatcataggaatataattgggctccagtgaaatgggagaattccctgacaccctgttgcaggatatgtgacagaggtgtggcttgtctgcttgaccgccttgcactcaaactccttgcaggagagggagcatgcagatgggcaggtgtgggagccagggcaagaacttttgggctccagtcccatggtagtatctaggggtgggtgcttgtgactcccaaagccccagtgggtgtgttacaatgcccttttagctgtgccatccacatatggcttaagtgttaaccagctcagtgctttcttggtacctgggttcttgtccggtgtccaagaagaatcaggttacatggataaactgaaggatggtaaatgtgggggattttattgctggatggaggtggctctcagtggaatggatgggaaactggaaaggggatggagtgggaagatgatcttcccctggagtttgggcatccggcggccaatctcctctctgactaaccccagccgaaatcctctcaatgttcagatgctccttttcttctcttcttctatgtggcactgctctgctattctcctgttcctctgctcttctgctcatggagcctggggtttggggtttatatgggtataggatagtggggcatggtgggccaaaaggcaacacttgggtgtgaaaacagaagtgcctttttttatttagggctgtgggtttccaggcttcagggtggggcctttgccagggaactgccctcttctacccagcatttccctgcctcctgtctttatcaccagtagacttgttccctgctcttacaggatttcatgcgtgtccgtgtgaagagaccaccaaacaggctttgtgtgagcaataaagctgtttatttcacctgggtgcaggcgggctgagtctgaaaagagagtcagtgaagggagataagggtggggccgttttataggatttgggtaggtaaaggaaaattacagtcaaagggggtttgttctctggcgggtgggagtgggggtcgcaaggtgctcagtgggcaggagtgggggtcgcaaggtgctcagtgggggtgatttttgagccaggatgagccaggaaaaggactttcacaaggtaatgtcataagttaaggcaaggaccggccatttacatttcttttgtggtggaatgtcatcagttaaggtggggcaggacatattcacttcttttgtgattctttagttacttcaggccatctgggcgtatacgtgcaggtcacaggggatgcgatggcttggcttgggctcagaggcctgacattcctgccttcttaataagaaaaataaaacaaaatagtattgaagtgttggggcggcgaaaatttttggggggtggtatggagagagaatggacgatgtttctcagggctgcttcaagtgcgattaggggcggcgtgggaacctagagtgggagagattaagctgaagggaggtcttgtggtaaggtgtgatattgtggggatgttagaagaaacatttgtcgtatagaatgattggtgatggcctggatatggttttggatgaattgagaaactaaatggaagatacaaggtccgaataaaagaaggaaaaaaatgggtattaaaggactaagaattgggaggacccaggacatccaattagagagtgcccaagggggttcagcgtaattacttgcttggttggcaagtttttgggctctatccttgagtttttttatgttgtcatacaccaggccagattgatttaggtaaaaacaacactcctcatttaagaatatgcagagtcctcctttttcagcattgagtaagtcaaggcctcggcggttttggaggacaactgcagctaaagagtcaacttgggcctggaggactgataaagtttgtgatatgtgtgtgatgctagcagagaagtcattagacaggctacagaaggtcatgacagacgttgaaatgcctgctattccagtaccgagagcaatcatggaggcagaaagtcctaaaccgaccatcaagggaattagtggaataactcttttttgtcatgtcggtgtcatgaggggaacagggagctcttcggtcccatttgcaaattgaattttgggggtaaggaagactagtgtacatgtggctgtccaattggcaggtagacacatgtaggtagaggatccacagaggaagaagagaccttgtgcgaggcaaaactggagatgtaaagtaaaaaggtgagaaggagtgctgaaaggggtgtcttgtacccagactcctagggatccacctagggcggcagctgtcagaggttgtaatggggactgatggggtaactgcgtagagggggaggttcgattttcatggtgtatgagaaaacgttgagtatctacgagcaacctttcactgttattttcggggctgggtataagtaaacaagaagagggcctgggaggagagtctgatgagcaaggggaaggtagccaaggatggagtgaaatacagggcacgtgtcttcctaagcaataattactgctaatgtttttaagtttgtcagtattgatagagggcttgtctgtaatatggagctggaaggctccaattgtttcagtgatgtgtgtagttggacttcggagatgaagagtaaaggaacatcgagaaggtgaaaggttacccaggggaattccagtgggtctttgccgagagatacataaaggagcagccacaggaatagtagtttgtgttgtgagaggtccaaatatggggggagtagagttaatataaggagaaaggttttttaaataagtgcgaaggagggcggcagcttgctgatgtgaaatgtctggggaagtcttgctgaacctgtctagaaagtaaatgagttcttcaggagggtaaaggtgagggctgttaaaggaagttcggaggtgtagggagacgggagatgttgcccagtctgtctgtaagacggggacagctgtgtaggcactggaagaaagggaaatgcaaagccagcagttgttcgctaaggagggattagaagcagctaggagagaatgggttaaggttgacagtgtggtggagatagctggggagaggtagagggtgacataagaatgggaatgagaataagagtgagtataaaagtaaagaatagaacttcatcagggtggaagtattggagggtgccttgccagcaaagatcatctatccactttaagagggagttaagagtggcagtttggggatagcaccaagagatatcagctgtgatggcttgaagaaacagtgtaaaccagcagtgtaaacaagagtagggcatttataagtagttgagaatggagaataggagtatgaccggacagaagatagtagggatgactagttttttggggctcggcctaagtggtggggtgacttcgtaaagccctgttgcaaaaagtagggtaaggacgaacagacctaatagaatgaagggatgtattaggctcataagggttattactgttcttcagaaatacgagtgagtttaagggaagtgggggagagtacttgcgacttccaggaggaagaggagggattaggctggctgtccgatggacacagctttattctggaatggtgaacccagtggggaggatcctgcaggcggacggcagtcggggtactatagatgactaagtagggtccggtccattgaggttatagagtttgaggggtcagattcttaacaagaactgatcgtccagctaggttgtcttcatatggctggggatctggagtaggcaagagaagattagcagcctggcgaatttcctgtctagcctgctagagcactggaagatagtagcctagagggctggtgtctgggatgaggttggggccaagcaagaaagtgcgtccatataaaagttcaaatggactgtaccctgtagcatctcggggacaggctctgactctgagaagagcaagaggtaaaagtactgtccaatcctttttaagttggaggctgagcttggtgaggtgtgccttttaaaagaccattagtccgttctacctttcctgaagattgaggacggtaaggggtatgaaggttccactgaataccaagagcctgagaaactgctttggtgatttggctagtaaaggctggtccgttatcagactgtatagaggtgggaaggccaaaccggggaattatgtctgacagaagggaagaaatgaccgtggtggccttctcagacccggtaggaaaggcctctacttattttgagggcctctaacagtattaaagcagcggcagccgctgcacacagacatgagggctaggttaaaacagtaaggtcaagttgtttggacagaaaggctacagggtgtggtcttggctcttgtgtaaaaattctgaccgtgctaaccatgcctaggaaggaaaggagttgttctgtagaaggtgcttgggtttgagagattagtcggacaggattggcagggagagcacgtgtgtttttatgagaattatgccgaaataggtaacagatgaggaagaaatttgggcttgattgaagtaatgggggctgtctgtgaagctttgcagcagtacagcctaggtaatttgctgagcttgatgggtgtcagggtcagtccaagtgaaagtgaagagaggctgggattaagggtgcaaaggaatagtaaagaaggcatgtttgagatctagaacacgataatgggttgtagaggcaggtattgaggataggagagtatatgggtttggcaccacagggtgtataggcaaaacaatttggttgataaggtgcagatcctgaactaacttgtaaggcttgtctggttttaggacaggtaaaatgggggaattgtaaggagagtttataggctttaaaaggccatgctgtagcaggcgggtgataacaggctttaatcctttcaaagcatgctgtgaggtgggatattggcattgagtggggtaagggtgattaggttttaatgagatggtaaggggtgcatgatcggtcaccaaggagggagtagaggtatcttatacttgtgagttaaggtggggggatagaagaggaggatgcaaaggaggctttggattgggaagaagggcggcaatgagatatagctgtagtccaggaatagtcagggaagcagataatttagttaaagtgtctcagcctaataagggaactgggcaggtggggataactaaaaaggagtgcttaaaagagtattgtctaagttggcaccagagttggggagttttaagaggtttagaagcctggccatcaatacccacaacagttatggaggcaagggaaacaggcccttgaaaagagggtaatgtggagtgggtagcctccgtattgattaagaaggggacgggcttaccttccattgtgagagttacccgaagctcggcgtccgtgatggtctagggggcttccgaggcgatcgggcagtgtcagtcttcagcccctaagccgagaagatctgggaaggagtcagagagccttgggccagagttccaggggctctgggagtggctgccaggtgagttgaacagtccgattttcagtggggtcccacacagatgggacgcggcttaggaggaatcccgggctgcgggcattccttggcccagtggccagatttccagcacgtgtagcaagctcctgggggaggaggttctggaggaatgcctggccgctgcggttcaggcgtttggaagttcttgtgtgctggagatgtggctggggtttgtctcacagtggaggcaaggaattgcaacttttttctattatggtacaccttgaaggcgaggttaattaaatcctgttgtggggtttgcgggctggaatttaatttttggagttttatttaatgtcgggagcagattgggtaataaaatgtattttgagaataagacggccttttgaccttttagggtctagggctgtaaagtgtctcagtgttgctgccaaacaagtcatgaactgggctggatttttatatttgatgaaaaacagcctaaacgctatctgatttgggataaagaaaaaggagcattaaccttgactatgcctttagctccagccacctttttaagagtaaattgctgggcaggtgggggagggctagtcacggaacgaaactgtaagccggaccaggtgtgaggaggggaggtgataaaaagattatagggtggaggagcagaggctgaggaagaattgggacctagctcggcctggcgaggaacaacctggggaggaagggagaggtcagatgggtctgtagaaaaggaagattagaaagactcagcgatgcttggggttggtactgaggggacaggcaggagggaaagaaggaagatttgggatgagtttaactggtcacagagactaggaagggactgatgtgtaaaagaatgcctggatgtcaggcacctcaggccatttgcctattttatgacaagaattatttagattttgcaggttggaaaaattcaaagtgccattttctggctatttggaactactgtcgagtttgtattggggtcaagtggcattgcagaagaaaataaggcatttaggttttaggtcaggtgtgagttgaagaggttttaagttcttaaggacacaggctaaaggagaagaaggaggaatggagggtggaaggttgcccatagtgaaggaggcaaaccctgagaaaagagagcatagagacacggaggaggggagtggggttcttgccctccagaaaagcagagagggggttgggacacggaaataagggattggggcacagagataagaggtcagggtgcggaaataagggattggggcacagagataagaggttggggtgcggaaataagcgattgggggtttcttgccccctaggaaagcgggacttgccgctaagggtgaaggagaaggggttgaggggtacttgcccctgccccaggaaagcgggacttggcgctaagggtgaaggaccaaggcaggtgtccctgcgtggtctgacacccttgaaacgtgagtgtataatcagagaggtgtccctgcaatgattaaacaccaagggaaggctgccttcccagtctgtgaccagcgccggagttttgagttcacggataaaacatgtctcttttgtctctaccagaaaatgaaaggaattgaaattaagagaagggagagattgaagtgtggcaccaagattgaaaggagaaagcggttgagggatagtgagggaggttggagaagagagtaaaaaaggccgcttaccggatttgaaattggtgagatgtttcttgggctggtcggtctgaggacctgaggtcgtaggtggatctttctcacagagcaaagagcaggaggacaggggattgatctcccaagggaggtcccccgatccgagtcacagcaccaaatttcatgcgcgtccgtgtgaagagaccaccaaacaggctttgtgtgagcaataaagctgtttatttcacctgggtgcaggtgggctgagtccgaaaagagagtcagcgaagggagataagggtggggccgttttataggatttgggtaggtaaaggaaaattacagtcaaagggggtttgttctctggcaggtaggagtgggggttgcaaggtgctcagtgggggtgctttttgagccaggatgagccaggagaaggactttcacgaggtaatgtcatcagttaaggcaaggactggccatttacacttcttttgtggtggaatgtcatcagttaaggtggggcaggacatattcacttcttttgtgattctttagttacttcaggccatctgggcgtatacgtgcaggtcacaggggatgcgatggcttggcttgggctcagaggcctgacacaggacttgtgggaatataatccatggctgtttgactactctgaactgttatactgctgtttttctgcccagggggatgttaaagccaaaagcaagtaatcaacaagattttttttaatcttaaaatactgaattaagccttaacctttaaaacaatttttgttgtagacatagatttgctatttgtttcagacatcctttaggcttttgatctagcacatgactaccccttcttaccgcattgcccctggatcccccaaggagagacacatggctacctcctttgtaccttggcccttgctgtactgatcacagctagttaggacagctatgaaagcctgctccatgcagaactgattctgttcgcatgagaatttggaattggaatttagagctaaccagttggtctgtgtttgtcctgaacataacataaaaattaattgaaatgagagacagagagaggtgtattgttgtgggggcgggtgagaaagtagggtgagggaagggaaggagggaatgctgaagtatagagcagagagcagcagagaggtgagaaacaggaaaacattcctcaaagcttctccactcccagtccaggaatcttgcctagccttgagttacagaacacactgttatctctggataatacatttcctattttgctcaaagtcctggtgtgaatatgcaaccagagatttttaacgtaaaaagaagctatgagcatatgaatggaagttgaagacctgagaatggactaagggactcagggttagggacagaccctaggaggaaagatggcattcagagatagatagttaaaaaacaatcaagaaaaagtagccagataagtaggtgaagaactgcttgacaatcaaggaaagattggtgaattaggtaatattcatttgcataaaatgttgcccagtggtcaggtaggcgaaaagctgaatataggcagttagattttaccatttttatgtttctatcccctgctacctgactaaactattttcaaaatgtattttatagcttagagccttcccaaaattcctagtattatatataaatttccaatacatattgatagctgaacaatcatattttcctggggtttattttaataatatatgcatttattttagccaatgatattcacaaagctttgctgaaatgtgttttgtttaacttggttctgtatatttttccatgaaaagccatactaaaaggacattttccaagtattaaaaaaaaaagcaaaaaaccctgcagtccagaatgcataatttgttctgggatagttaaaattctaagagaagtcttctttgttctttccttgctctttctttgttctccaaaagggtcgtatttaaactatgggtcatttctcatctgaatagccagggaagattagctacattgctactgatgcacttgatattttctcattacataacatgtggccacagattctagccagtctgataagataaaatgttcataatacttagaagataaaagggaatcatcactacttaagatccctttaaatccaatctgttgatctgtatgagattacatttttggctctcatttactagttccccctaaagaaagtcttgatatagctactgggttcctggcttgtattttgatagtcaaaacggcagtctggatatttttctactcagtagatacaatagaagaccaaagcttcttgcattgtagtcactgaccttgccatgtcatttcatattttctgtagatttggtcctggaaaatcaaatattaagcaagtttgacagttcagctaaattccataaggtcatctatcacattacatacagtaattgattttacgttaattggtctttagtttcatggttcatgtttctggttttctggtagtttccagaaactttcgtgttaaatgaagagctatgctatgtaaataaaattcagtaaaacttccctttcattttaattatgtgcttttgaaaactaattttattgggttctttaaaaaactccgtaggagtcaggcatgaattttctactctttagggcatttcaatcatgaaagaaagaaccatctatatttttcatcatctcaaaacaattttagaccactactatttgtaggtacaaataatgttcattgatttgctttatatttattaatcacctaatagttatgaaatggtgccctaagtactgtgactaaaaaataaatattagtaagttaattttactaatttttatccttaggagctttaatttatgctagataatatctgagaaaaagtcaatagtatgatgctgtttaaagaaagaaagcaactgctatcctgtgttgttgtattagcagaattgtcaaggataaaataaataaggtgaagattagactccacttggcaatctttagcccttgattggagtaccatgttccatttgggaaggcacacttattacaacatagacaagtttggcagaggtttcaaaagaaagcaacaaaaaaatgatgaagggccttgaaaatggggcctgtaagaaaaggctgagagacgtgagaatgttcaatcttgaggaaaaaaggcagaggggacacatgataactgtttacagatgcgtaaagaggtgttatggagagaagagggacctatttttctcattagtcaacaaagacacttcaagaagtaatgggtttaaaacacgtggggggaaattcaggttaattattagattaagttaggtaaaatttaaatatttaaaatgttatgattccaagcataattaggctgtggagactaaatcacattagaattggcataggaaagtgagatgaaaacaaattcaatctgaatgcagagggttaattattgcaagtttatatttgcattaaatgttatcatatttcaaaatactttcacatatattgttttactgatctctggacattcttaggaaagagagagtgtatcagctagttttacagctgagaaaatggaatttcagagaggcaaaatgttgcttcgaacccccacactccagattagatagacaaaactgctaagtgcataggattagacaagcaggactaaaagccaactcttcacattttctgtcaatatgtttcacatggtaccttgctatcttttcatttgtaatatgatttctattgtggagaaatattgtttacatagaggaacaagaaacatgattgaacttatatctgcattacctatatctattatttatctctcactactcacaattgtgaaataaactcagcactttggtattatattttgacaaatcattgccaaacgtaatacaatctccagttggtatgatgtggtgagaccctaccttctaccattacctagaggtggagacacatttcatcttttatgaatttcatattcctcatctgtaggaagaaaattataatatcttctggtttcttctagttttacaataaggagtgaatgagaaaatacctgtagaagtacctgaacttgttcaaagaaataaacttgttcaaagcataaactttgcttggggggaaatgtgtgttgtttttggtgtactgtggattttgataatccctttccagttttattttcaatcctaccttttttttttttttcatttcctaatttcagattcctgaggtcaaggccaatgtctttgttgaagcacttaaaatttgctagtctaatgtaggtgttcagtaatagttggtgggtgactgagttaacaaatggatgaataaatactttcagttggatattatgtctgggatatgagcaagaggtgataaatgccatatataatcatcttgttatactcctttatgtaatgatgtatgtttaaagtattttatagaaacatggtatgccagattctcagttagatcctgagaatacaagccactcaaagtctaaaggggttttgcagaccactccaatgctaggtatagacaaaactcttcccagcaaagcaaggtagctgatgccaaaatgttaccaaggaaagacccattggttggttgccaagacccttatggagtctgagaagatgttttagactccctcaaccatgcacacaaattgtgtaaagtaatccaggaggcagcctaaatggaaaggctgttagtatgctgagcttgctaggaaatggaggaattttacggaaaatgtcagcctctgtagactcctgtgatgctcgctagggtgccagccttccccagggagcccacagcacctggcaggcagactgcagcagggagtctcactgggaggatacaaaagagcttaatggccccctgtgcataatgttgaaagaggctgcaatttttgttttcttcggagattaacgtgtgtgtattgcaggttcaaaatggtaagaatcttaattagagttgcaggaagttgcataatatactccatgtcttactttttccgcacaccaaataacagaatctatttgccaaattatgaaggttgatggagaatgaaaactgtaatttgagtaaatgggagccctgcccccattttttccagttagtcacaaagtttaaaatgcaaagaagtaaatctcccaagggagcaattctatttcatctgtggaagaaagacatatgttgttactgatgaaacctctgttgtgaaagcagagccaatgctgggaaaaacttgaaggaaaaactagctgagagccctctgtctcaggagcctgtggcctttgggtccacccagggctgcctgtgcctcttcctgaggcttttcttgaaggcctgctctttcctctgattaccttagggcaattgcctgcctctcttaagagaaaatgtacctgttttgtgccacatcccttcaggcccctgagctggacagtagattgatctgacagatgtcactttgatattaaatcaatagtaccaatatgtttctgggttttcctggccttagcaaggttttatgttcacttacttagagacattctggagaatatctcagaactcaaaacatgagatcaaattggagttctatgggagagaggatattgaattacttggctttattatggctgcactcatagggccagccacgtgtaaaagtttcattctctttttttgaacaaatatttattgaaaacaataaattaccaagaactgtgttaaaatatacagatgtctaagcagacacggcacaatctatggccctaagaagtctaggaggtacaatattttatataaattattcatcttcattcaaagttatttattgagcatctactatgtgccgtgcactgtgcatgcccctggaaagcataagagacaaaattcctttctttgtgggagctgtattctagtgaggttcagcaggtgaacagcaatccgtgttaattatttcttcttccactgaaatgaaaattctatgtttctaaaaaatattataaaagtactcttcaaacctcatattaagaaagtcaaattgtctttagccacatttgataaggattaaagataatcttactattttattttaaacatatttagagcagtccttgtctgaaggaagcttgtgttgaattttttataaagtgagttaattaccttctaattaattttgtgtgtgtgtagtgctcacctaacacaagattttcatgctgaatttgctcccccaaaagaaaaacaattcctatatatgttgtaaagggtcgcaagtcagaactgagatggaggcaatacaaatatataaccagcggcctcagacaagttcccaaaattgggaagaatgaagagatagggaatgactgcagagcctttttcaggaaagcatgagattggaagatgaatgctcaagtaaattagaactcaggaaaagtactgaacagcaggatcatatcatcaaaaatctggctgataggttttgaactcactgaactgaatctatttagaagtacattttgggaagactaaataaacatcaacactatggtctattctaattcaggctcttgctttgtctattttccaggtgataaaacactgattgttattagtgttatcatcaagcatattgagcagtcaatctgtaagttaatagcaatacacagccatatagtcctggaactagaaggaaagaaaatgaattttttcttttttttttttctttttttttctgtagaggggaagaaaaattcaacaccttgagtcagctgcgactcaagggtccattataacttcgagatttttaacagcctgtgcctagggtatgggagatgaattttgttccaaagtggtgacatgggcagatataaacccctgggagcaatttcaggcaagttgagagtccattctaaacaaaaatggacagaatgtggaagatggaattcccacacttgctttctgaccttggctgatattcctcagcagttggtaattagaggaaatactgaagctgagaggatgaaagaataaagaagagtagaataatcagaattgaaagaatgtaaataagtaataagatggggcaaaaacaggaatggtgtcactgacaaaggtggccacactttgcagtaagatgtgagtgggacatagaaactagatttggttgagtaagaggaaaaccatatatacacacacatatatatacacacacacacacacacacacacattaatatatgcatatttaaaaatatatacatttcaaaagctcatttatgttgaatactaagtgggaaattcatcagctgtttggcttcctgtctgttttattctttgccattgcagacttgagttgtcttcctgaaatctttctgggagataactgcatgcccagcccttttctttcatcagaaaaagggtattctgccctgagtcagaagcagggggaaaatagatgataatatctacatgttattgctagaacagagtcaaataaaaattaaaagtccatcaagtgatcaggttgaagtcaataaaaaggtcaataaaaagcaaggatgagccaaaaaagaggacttggtgtactggaaaatgccaggaaaaataaaagacagaaaaaacactgtggcaagatcttctcctgtggcctcagggaagtgcatgataaaattaattgaagcttatcacccatgaaaaagggctacagttggagcaatagctgcacggactacataacagtacaggttctttagcctaagacaaagataacagatttttgttttacttttgcaagcttttttaatatactgagttaaaactctctttttttgcctttattcaactgaatgctgcattttttgagcaatactaagtgttgattggcttacttgaacagcaatttgttaagaggcctgctgtgtaccggccattatcctaaataccagtgtacaaagattagtgatgtgtctatctgctttcaaaactcttataatctgtagcaacatgagattaatttttacatatggtttatatataacaatctaattccaatacaatcatatcattctccatatctcataagaaattgttttgggacattatttaaagaaaactttatacaataaatctataaattgttagtagatttgactcctcctttagatgaaagttttcatcttgtcgtttttttaaattcaaaatatgttattttaagttgatataaaacaatcatattagcaaaatgcatccacattgaaaacttagctggatgggtaaagatcgctctattaaactgtgatgtttaatactgagtgtcaacttgattggatttaaggatacaaagtactgatcctgggtgtgtctgtgagggtgttgccaaaggagattaatatttgagtcagtgggctgagaaagccagaccgacccttaatctgggtgggcacaatcaaatcagctgccggtttggctagaatataagcaggcagaaaaaggtgaaaagagagactggcctagcctcccagcctgcatctttctcctgggctggatgctttctgcccttgaatattggactccaagttcttcagttttgggacttggactggctctccttgctcctcggtctgcaggcggcctgttgggaaccctgtgatcatgagttaataaactcttttacatgatattctcatgatagtgaataaatttcatgagatctgatgggtttatcacgggtttctgcttttgcttcctcctcatttttcacttgctgccaccacgtaagaagtgcctttcacctcccaccatgattctgaggcctccccagccatgtagtactgtaagtccaattaaatctctttttattcccagttttgggtatgtctttatcagcagcgtgaaaacaaactaatacaggcactgttccatctccaaatggtcataatttatcagttcaaaggaacgtactttgcatgccaccaaagggttttctaagaattgggtcagcaattttaagtcaaggttgttggttctgagttgtacctttgagtcagtctttcagcattttagttctcaaatctagttttctactctttccaatggggttattcatccaatagacatgggaaaatcatcctaatcaaaacaaatttatgatcatttctctctggcatgactgcatcaggtagcttaaaccatagaagtttattgtctcacaattctgaaggctagaagttcgagaaaaagatatcagcaggattgatatcttctgaggggctgtgaggaagaatctgttccatggttcacccagcttctggtggtttgctggcaatctttgatgttccttttgcagtgtcaccccattctctgccttcgttgtcacatggcattttctttgcatgcacatctgtctcttcatatggtgtttcttttataaagacaccagtcatactacagtagggcctcaccctaccccattgtgacttcattttaatttattacatctgcaaaatccctatttccaaataaggtcatattctgaggtatgagtgggttggactacagcatatgaattttggggagacataattcaatccattataatcatactgcataactgacgagaaagtaaagaatcaatctgatgcaggaaagataacctaatcaaaaagaggaattaaacaactccaactaattccttacatttaatctatttaatataaaattataattttgcaaacacagcatggtgcactatggtaactaaagcaattggatgatatttcaaaagctttaataactagtatttaatcacagatgctgtgtgtttttacctgaaattcatcctggtaatgcaacataattaattgcacaatttattttagcatgagttttcttatatttatagagatagcatagcaatcttgttttcaaatttccctcagaatgcttgagatcagacattattagcatggagacaatagtttcattgtcaactcctgctggtttgggtacatttacagtaataaccacaatccactagcttgaattattgttcaacattctatgtgacttcatgagggtattaatatgcaagagagttatttgatactaatcaaagatacacatttgtcttcacacttattacaatatggtaaggtaatcacataaaatacttaagatggtagacttcatacatatatatatatatacttttaatgaatatactaaagctaaccgttaatggaagctttgacagaaactcattgttcaatatccaagcaaatcaattttggactataaatgcagaattctaacaagcaaaaattctaatcattcattttatttttctgttattcgtggcttcttatattgttaaggcttaacatattaagatgcacataggatttaatcttcatgagagagcaatgaatacatcattgaatacataccaatcatgtgtaattgttttcatatgtatgtaagcccagcggaaaagagtcgttcattgacagtactcattttcccatttggtgtattttcctaattgtacagtataacagttatagtaaatggttataaatattaccctttagctgtaacatctatgacatttttgttgatcatgataatatgtgattgtttagtcaactgagtttattgtaattgagattggaaatcactataagagtgaaattgaatatatagatagagaaataggataagttaatatggcagctcaacactgaacacagactacaacttcttgaccaccgaaatatgcaaaatattatataatagcttgtatctggacagcgtgctaagctgttcacttgttctttatcatttaatcctcttttcaaatatgtgagatatgttctgagaagataagcaccttgttgagtcatacaggtaatacattttaaaggaggaatttatatacacttaagattgtgtgtgtgtgtgtgtgtgtgtgtatgtgtgtgtgtgagagagagagagagagagagagagagagagagtttcaggctccaagacagatattaatggtagactgcctttgttgcataactgtagcagtggtgtacaactgctactcccatcttctcagtacttcatctctttctttgaatcaactacagctattctgatggctagattatgatctgccagtttgagaatccaactcttgctggccagagacttacagttaaaaaataaatcatttagagtcatatgcttatgtactactgggctgtgatcctcaccctaaagctcactttggcatagctctttacttgccatcgattcttgacagccttatttcagaattcttacagacacagtgtctatttaattttaatacaatcaagcaatggtttctggacatatttggctatttctttgaaaacaatggaatctgtcttatgggcaaaatgacttttttctgccctaaatgctgacactgaattgcgttcaatcatgacagaatttgtgcaatatgaaaagtttgtccactgggtggacaatttctatctagcatttttctctccttcagggatggactttaagttgatttgacaaaattggtttcatatgaacccaaatgcaaaccctatattatctttaaacactggtttctgtgaagttgtttgattaaactaatactgttgactccctgttttctgttttatttctttaagatgacatcccttattctgttctgctacctgggacattgctcttctctccatattaattaattaatattgtttcctaaatctgtcttcctagtctctgtgtttgtcttcaccatgtgtattgggatatattctcgaagggtttcatgtgtgaattccctcttgagtcaaattgtacatgtaatttcccttcattttaaaaataaataagaaatatgagaagaattttcaaaacttttatgttctatatgctttcctctggtttggaaattaatctctgaatttatttatattttaggtattgcaatttgagaattagaagagttgtttttacaaaacacagaaaacagcttttgttttaattatttttcccagtgtgtctaagagtcaaaaagactctgtattagtattcactggcaaacagaacacaatgcagagcagatatcctagaagcaacatgatagatccaatcatccgattcattatagtacaaatattgtaatcaatcataatattcagtgttccataaatccacaattctgtgaaagggataagaaaaaagaaattaagctatcagtgagtttactaaaaaaggaaaagagatttcctgattatcatcattcagaattagtcagacatatacatggtaatcattcatattttaagcaataaaaggaaactcaacacaaagcctggaaagcaacagccttttatttttattttctctaagatgtgaaaaaatagacctaggtgctaatttaattcccttttaagttaatgacataatgggtttgtggagcattaaatagggaataaatatggccttacatttccatgtcggagctaaatgctttctcttccctcagcttctaattcctcagctgagggaagtgatcagcagtcaacgatcacaatgagggagctacgcacacatcctctggtttcctgagctttggaacacttaatgcttagtgcagcttctctattttgagttctaccatgaacccctctctgatgactcccacatatgtcttttttatgtaagcacaccaagttcagctatccctgtaggtagacagcatttgagacttctcagttgggtatgatttgagaagataatggagctgatcctcttgacataaactagcctattggtcctgcccaaactggtgttccctggaacagaggcctaaaaacaaaatatatttaaaatgttcaaatatatttagaaaatattgtgttaaatcaagttagccagatttttgttgctttcattgtcatttttgttaatattgttgcatgatttccagaatattcagtatgcaaataaatattcattatgaatttaacaaaataggtattttctaaacttctttgaccttggaactcttgttctcccttcccaaccccaccattgcacttattttaacattgcactcagcagggctatacgcatcaacattttgggaatttgaggatgaagatatgtttttcctattaaaaatgaattcttatcccactgggaaagaaaacacattaagcttttatcagtctttaacattttaacatggattagccattctgctctttctggattataagcagctgagagcaggctttcattatagggagagggaaagatgatctgaagtgtcatgtgtccccagagaggattttcaagtggaatgccaccatgagagttcctgggctagcagaggacaacttcatatagtgcagggttgcagcaaggccactgacaccagctgtatatagaaagttatgtttgcctcagtttcttcagccaaaacagaggaaatttactagatagtagctatctccctcttagctctaacaatacaatctgattatcttgatggctaagtgtgggaactgagagagttagaagagtgggggtcactagttgaaaaagcaaggttagaaatgaatgttttctcagtcatggctggcctagggctggctctgcaggagttcatgattctcatctccccaaacaacaaagagccatggaaaattcatcagataacagtaattcaacagataacagtataaagactatacatatttttaagatagatttaaaaaatgcatgacatatttctggcctccaatgagtgttcagtatgaaaaaataccaactagatgaataagtataggcaagcaaaagattctaagtataagaaagtgtgaaaagtaaaatttattttatttttctttgaaagagcagtcttcccaggtcaagagattagaaagacaagtaaggtaatgcctcttctctgaagtttagaacagatgaaagtgacacataaaagcagaataagataaatattatatcatagtaaaaggaatgagaggttgtatgtagagtggttgtggacttggactcaagagcatgtggacacaaatttctaggttaaattccctggattcagaacccatttctaccatcttactaggtctgtgtcctcttgtgtaaatggtagtggtgatgataattaccatgcctttctgctagaactattattaggaggattaaagaaaattaatatgtataaagcatctagaagagtgcctcacataaaataacaaacataagtatttactatcattaataataaattatatccaactagaatcattataaggggttttagaaaagaagtagcaataagataataagtgaagaatgagtaaatttttgaagctacaaatggattgaacatagtactctagggagagggacaatcatgaatgaatacatcaagatgaaaagtcaaagggtaaattttagaaatagcaaatagattggtttgctaatataacatactggccctttactgatcatgttgatcattttgtgagaaaacagtaggaaatgacttcagaaagaatatagtttggtaaaaaccattttaactgtaggagaatgaaactggattctcatctctcaccttatacaaatatcaactcaagatggatcaaggacttaaatcaaagatctgaactaaaaattctagaagataacattggaaaaacccttctaggcattggtttaggcaaggatttcatgaccaagagctcagaagcaaatgcagtaaaaacaaagataaatagatggaacttaaccaaactaaagagcttttgcacagcaaaaggaatagccagcagaacaaacagaaaacccacagagtgggataaaatcttcaaaatctatccatctgacaaaggactaatatccagaacctacaacaaagtcaaacaaattagcaagaaaaaaatgaacaatcccatcaaaaagtgggctaaggacataaatagacagatctcaaaagaggatatacagtggccaacagacatattaaaaacatgctcaacatcgctaatgatagagaaatgcaaatcaaaaccacgacacagtaccaccttactcctgcaagaatggccataatcaaaaaaataaaaaaataatagatgttgaagtcgatgaggtgaacagggagcatttcttcaccgctagtgagaatgtaaactagtacaaccactatggaaaacagtgtggagattccttacagaactaaaactaccattagatccaggaatctcactcctgggcatctacccagaggaaaagaagttattatatgaaaaagatacttgcacacacatgtttatagcggcacaaatcacaattgcaaaaatatggaatcaacccaaatgcccttcaatcaatgtgtggaaaaagaaaccactgtatatatatatacgtgatatatattgcatatatatatgtgtgtatatgtatagtatagatatatgtatatatatagtatatatacacatgatatataatgtgtattatatattatatattatatataatatatataaatatatattttatatatataaatatatatgatggaatactactcagccatacaaaggaattagttaatagcattcacagtgacctggatgagattggagattattatcctaagtgaagcaactcaggaatggaaaaccaaacatcatatatgctcactcaaaagtgggagctaagttatgataatgcaaaggcataagaataacacaatggactttggtgactcagggggaaagggtgggaaggcagtgagggataaaagactacaaatagggtacagtttatactgcttgggtgatgggtgcaccaaaatttcacaaatcaccactaaagaacttactcatgtaaccaaacaccacctgtgcccagtaacccgtggaaataaaaaataaaagaaatttttgcccaaaccaatgtcctggagtgtttctccagtgttttcttctagtagtttcatactttctggtcttacatttgagtctttaacctatttaaatttgatttttgtttatggcaagagatagcattctagttttattcttctgcatatgtatatccagttttcccagcatcatttattaatgagactgtattctccctaaggtatgttgttcacacttttgtcaaaactgcattggctgtaaatatgcagatttatttctgggttctttattctgttcttttggtctatgtgtctgtttttatgccagtaccatgttgttttggttactatagctgtgtagtataatttgaagtcaggtaatgtgatgcttccagctttgttattttttgctcaggatgtcttggactgttctaggtctttcgtggttccatatacattttaggattttttttcgatttttataaagaacttcattagtatttcgatagggattgcattgaatctataaattactttgggtagtatggacattttagcagttactgattcttttaatacatgaacatagaaaatgtttttatttttcatatctttttcaatttctttcatcaatgttgtattgtttttattttagagatttttcacttctttagtttattccaggtattttattttatttgtggcgattacaaatgggattactttaattatttctttttcagattgtttgctgttagcatacagaaatgctactgatttgagggaaactcttctacactgttggtgggaatgcaaattagtatagccgctacgaagaacagtgcagaagttccttaaaaaagcaaaaacagaatggccatatgacccagcaatcccactgctgggtatttatccaaaagaaaaacatcagtatatcaaagagatatttacactctcatgtttatttcaacactagtcataatagccaagatatggagtcaaactaagtgtccatcaatggatgaatgaataaagaaaatgtggtacatattcatgatgaaatattcagccattaaaaaagaataaaatccagtcgtttgcagcagcttggatagaactgaaggacattatgttaagtgaaataagctaggcacagaaagacacatattgcatgttctccctcataggtgagaactaaaaaaattgatctcatggagacagagagtataatgatagttatcagagcctggggaaggaaatggggagggggataaagaagtgttcggtaatgggtaatgggaacggaagtacaattagatagaaggaataggatctaatgtttggtaacaaaatagtgtgactataattaacaataatttattgtatatttgaaaataactagaagagtggaattggagtgttcccaacacaaagaaatgatgcttgcttggggtgatgcatatcccaattatcctgatttgatcattatacattgtatgcatttgtcaaaatttcacgtgtggcccataaatatctacaactattaagtaaccatgaaaattaaaaattttacaatttaagaaaagttaacttgacgagaaaaagaatacagtttggaagtcttcgaggatagataggaagagattttccatttaatttggttttaaatgggatcttgtctatgtttgctcagggtaatcatatgaaaggcattataatttgaaagcttaatctcaaaatagtactttttttggtaaccagttgtcttgcagcaaaaacaaaagcactgaacttgggtcaaaatacgtgaattcaaatccatactttataccttcagaatcaaacactctaagcctcattgcgttactctttaaaataaggaaagtgcatctaaattacacattgtttttagtagcaaataagttagatgaaaaagcatcaaatgtaatgttgggcatacataaattttcaatcaacttttaactatataatattatctgaacaagacaagtgaagaatacaattgtaattttttaaattgcaaggcaacagtttctaccctaataatatctacattttcctcataaaagtcagtgcatcagattctatacagtatgctcttcaaattcttggctccaaagttagcaaattaaacatcccatctcatttctagtttgcagtgaaattctcaaaaagtttccagaatccctgatgttactcatcctgagctacatctgacttctaatcagcatcttttacttagaatacagatagcaaatctggttggcagttattttccaatgattcttctgccatactgatgctttataatggctccaaggaaaggccattctacaaataaaagcaaaattaataaaagaatgcgggataattgacagttttgctacaacagcatttaatttgaatcctttgaaacttactcttcactcattgatttttaggctcacaaattctttgtgtgaattctctcttttacttttgcattgtgaaatgatttatcatttgggtaattttccagaattacactttattattttgtaaatggcatgcagcacagatggatattagcaaggtctctgtataaacgccagcaatagaggtggtaacattgccctgagagttttctcctgaaacaaatcaaataaagaagagaaagcattgccaaagctggccatgacagaggaagtggatccaataatagacatctcgatggatacatatatatgattcaatattgtgtgacctttactttcaaactcactttcagaaaatatattctaaaggggtgccaaggatattgctgtctactctctactgacttccatgaaaggaaacaccattcctctgtatctcagtcatcaatgagtacatttatgaaagagtttggccattgtcaattctaatgccgttaagaagaacttgagcatagcttacatttttttcctcattttactcctacttgtatattgctttggcatatactattagtgcaatgctgtgacttccaaaacttctcagaaagtaacaacttggactgttaagagactccagcatttgaaatatattttaatgcaaactgtctccctgaagacctctatccatagctaagatagttgtatccgaaagctttgcgcttacttctttgcagtgctatttgtaaacattggcatagtaagagtgataaatttctatggaatcatctttatcaaacatacattatagaagtagaacttattccagctaaccacattatcatgaatagcattttccatatttctttgaaacaatacaatagaaacaatattatcttaaacattaagtatccccattgattggtccagtgaaatactgcttggaatgaaggcttcaactttaaatctatttaatcaaatttggtaaaacaatcatggatcaaatatattattaatgttacgtggcttttattattattattattattgcaaaaattaggagccttggtttttgtggccttattctatttcagttagatataatatctcctggccttgggtgctttttacatacaaatggggtaaaatagttattataaagaatagagattgaatagatgtgcttagagtaatgtctgacacaaagcaagcactcggcccagcacagtggctcatgcctgtaatcccagcactttgggaggccaaggcaggcagatcacgaggtcaggagttcaagaccagcctggccagcatggtgaaatgctgtctctactaaaaatacaaaaaattagccaggcatagtgccatgcacctgtaatcccagttacccgggaggctgatacaggaaaattgcttgaacttgggaggtggaggtagcactgagctgagatcccgccattgcactccaacctgggtgacagagcaagacctcatctcaaaaaaaacaaaaacaaaacaacaacaacaaaaaaagcaacggctgttaattgccaggaagaagagctcctacaattgtttcatgtgcatttaggcactctcttccatgtgagaccccaagcagtcagcaggactatcaaaggaacccttttaagacttagatatctatttttaattcttgcactgcatttctactttgataaggggaaaaggcattaaaacacatttttgaaatgtaaatttccaaagttacaaaaattaacccaacacatcatatgctctttgaatcacttaaattggcagctgtcttataatgataaaagacctacggcgttcttagatgatgtctacatgatgccagacagctaattgaattaaggaattaaggaagatatcaactagtccttccccttatttgccagatgaagaaatggaggccaagaaatgtgtagtgatttatttacatcaggggttgagtctgttggtcgtgagaacttctagcctagttattttttccaccccatctatctgtcctgaaatttggtttcttattgctgcagcattgaagagatggaaccactaaaaaaatactgataaaaagatgtttatccagaggcaactttaatggcaactcaaactatttgaaatatgatggaaaatttgttactgagtgaaaaggccatcgcacaatcaaaattgatgtttaaagctcgcctactaactcttccacactatccaatgtagtggtcctccttcattttgctctttagagtttccctaattttctttatgcatgcatctgatttcatcttactttagagaaaatactaacagtgtatgtctagaacatggcagattggagccttatagcacgagaggcagggaaaagacagctaatagcgattcactgataggagaagaaggggtcccatattgtttgagttttagataacgtttaatgatcttcctggataacagattctatgaggattttttttttttgcttgtttaaataaaagctgattcaatgataacaaaaggagagacagtaacttcagaaaaatatagatatgctaattcttacatttgtagagcccttttgatattaaggttcaagatctaaaaatgtaattctcattcaagaccgtataaaaattgttagttctatataagcatattgaatcactgatagattaaagcacattcatcatactctagaaaacaaggaaatgtgtaatatatttgatgtcatttttattacaattgttaaaatagtgaagaataaacctgttaactagaaatctatgcatgcagaatgtcttattacctaaataacaccagataaatgaggtgttactgtccacagtctcacaacagagacatgaaaaacccttctttacactggtaacccttaattaaactgaatttttggtgtgtcccttcaggagaaggtcaccatatcagcaataattaggggaaatggcattgtgaacattactggatgagatgtggtgtatttcttactttcaattattgcctccttgtttgaatcattagcatttggcagatttgttgctgaatttgttgttctgatttaaaactcggtgtaaggttgaatatgttcttatcttgatcttatatttctgccatgacttgcatttcttgctgagtttctgacttgaattgctctatgtttttgctgagcttttgctttgtcttgttgtatttctatctggaggggtttccctccgcctttttctttttgttatatctcttctttggcctattgtatttctctggcccattcattagctttttttttcctttaaagttattctcttgttcagtatatgcagtacctaatcaatacgcttccttgcttgctgcaggatttccaacttactgtgttttctgtcagctttgatactgcctgagaggggtttctgtgctttggctaatatattgttgtctgaattcgcagtgttttcagctcattacactgactttaattttgatgtatttgtattttatccagttcaagtcatgtttctttcctctgtcaatttaattactttctgcctgggcaacattgtgtttatacaattgctgctaaagcgacaaaaggtttctatttaaattaccacccagagcatcagcaattcagcctaaaaaatatgcagaactcctctgattgatgtcttacctttctgtggataaggaaatctagtctattgagaggatcttctttatagaacatagtcaagcctggtttatagctgtagagtcattaacagaggagatgagtgtagggctatggggtcactgtatgacttctctgtaagaaaaaaatgtatgactaggttctattcagtacaagtcatgtcctaacagcaggaaaaagaaaactttcttaggtgtttaacttatatttaggtgggctacccaagctccagctcttatttttctatgtgttatatatattatacacatttctgggtttgaatcttgttctttctaataattttgcattgggctgtgtaagtcaggaacattgaatttccattgtgtacataaaactatagcaactggtctaaaaacaaataatgtgggaaacatagtaactgttcctgttttcaaaggcttacaataatgcgaaaaaaagggaaaagcttatgagcaatacatctttgaaaacagaaacagtgaaaacactccagtaaatacataattggttattaatagaattttaaattggagaggcataacaattgcaacagctcttggaaatgcttaggaaactgaggcttataggtttacccgaacatatgtcatagataacattaatcaactagctgatgaacatgaccagcaaatgcattgattgcctgatcagcaaatgcttcaactgttttgttttacaagacttaatatgtttaaacaacaacttactctttacctactttttaaaaatatccttctgtattttctgcaacaaaccattgttgagtccctgtgcttaacaaaactgtgcaactgtgctatttacccagaggaagaagaaagatttttttaagtcagttcttttctggtaagtgtaacttttctagtattggataatctttctgagcctcagttttcttatctgtataattggcataaatgaaccatgagaaacaaataaaatgacatattcagctcagtgtgtgtcacatggtgagagacccattaagtttgctcttttccttttgcctttctcttttcagtgttcagtcattatactgtcaaataaattggagtttctggcttttctcacactcaagattattatgatatactacactagtacatctgaccttgataaaaagcaattttctatagtttaattgtatagcaataggatgggaaagtctctgattctcactctgtagcttcttcttcccagggctggagtcatttaatctctacctttaggctcattctaccctggtcccttgggtcatgaattcatctggaagattcagacttatgctttaaggctctcagaaactcaatcttgcagaagaatctggcctccattttgtacacactttgttcaaagagcctcctagcaccttcccaagacccacatataccactcccattttctctcttggttctggtgattgactctctttatgttcttggaaagctgcctagtatcctaaaaccagtattgctgcctggctgttaccaggctgcaccctcgactaaagttgatcccctgcactcatctttggactctagatttctattacatgcacatcccttgtgccaaattatgctggcttgtctggccttccaagtttcacctattgttatgcttatttgtcagttcaagtctctattccagctctatcccacttccttctttctttagcctgtgtccctctcttggatccctgaaacattttgagtactagctactcctatgtcctgcccatgtgattaagaatgatacttttctcccgtgcttgcagctgggtagtcatactccatacccacccaggtaaaaatgtctggatccaaatctacctttcataacagatctgatgtgctattctagacagctttactccatgatatattgcagactttatgtaggttaacaaagcattatggtgtcattcttgtgacagccctacattttcattatgatttttgtgtttgcggtcctttttgtgacaatttcttttagatgaaaatgcttttaatgaagcccttttggtacttgggagcctcactggaatggatttagtacaaacttgccttatttcaaatttatgttcaatattgaacaacactgttacccatatttaggacagtagacaggtaaaggttgcagaatttttatgaaatataaagcaatatccactgttataatgaagcactacataaaattgtataatacgtgagtttcttattcctcaaatagtctaactgattgttcattgggctcactcagccaaaagtagagggaaactttgtacagacatcattagtttttctccatttagagattaatcatgaagagctctggctctttaattctgtaatttgtatatttaatgggctgctgcagaatctatgacagtaattagcatagcctgaaaactcattaatacgcaacaacatgattaatgcagcattaatgcaaacatgactgaagttatttgggttatgtagtaagaagattaaagctaaaatgtcctgtttgttttaccagtggtgagtataatagagtggcaaaaaaataaaataaaaacaggtatcaaattagctgtttaaaaaaaagaaaaaaaccagcaaaatttaaatcaaggtgattttatttttcccttaggtctaaaatttgggatataagttatgttctttacttttatatttattcatttattcataaatttatcattactgaaggaaagttcattcaaccttttagtttaacatagttaaccttttagcagctttaacataatattattagtcttacattggaaacaattttaaattgtactaatctttgaccaatacattacacatttctgttttgaaactaatatatattattggctatgccaaataattaaaggatttgttcctacttattcagaagttacatattatgccctcttctcactgtgttcacctcttaaataaatgttcaaatactttataaaatactaccataaaactcatttttttaaacaaaactatcaaatatgacatgttaaatactgaaataatcaataatgtttggggatgtaaaagtatataagttttgcttgttcttgctgtctcatgtaatcatattgaagtcctctcattcttacttttttttggcttttcttttttgagacggagtctcactgtgtcgcccagactgcagtgcagtggcgccatctcggctcactgcaatctccacctcccgggttcaagcgattctcctgctcagcttcctgagtagttgggactacaggtgcccgccaccatgcccggctaatttttgtatttttagtggagacgaggccgggtgcggtggctcgcccttgtggtcctagcactttgggaggccgaggcgggtggatcatgaggtcaggagttcgagaccagcctggccaagatggtgaaaccccgtctctgctaacaatgcaagagattagctgggcgctgtggcgggagcctgtagtcccagctactcgggaggctgaggcaggagaatggcgtgaacccgggaggcggagcttgcagtgagctgagatcgcgccattgcactccagcctgggtgacagagcgagactccatcgctaaataaataaataaatacataaataatacagacggggtttcaccgtgttggccaggctggcctcaatctcctgacctcagatgatccatccaccttggcctcccaaagtgatgggattacaggcgtgagccacagtgcccagccattttttttttttttttttttttttttttttttgctatttagtatgacctgttttaatagcggtcctaaactttaaatgacttatttttcaatcttatagtcaaatgtcaagagtcattaatagtatctcaaacaaaacttgcattttaaggttaagcaatcctggatgactgaaaaaaatatgtatctgcttttttgtacttattttattctaaatccacattagaaaaatgtttatgattttattctttttcaataaaaaaaaacaagtgaatatccacgaagtacctgactcttggctaggtgttgaggaggaaaagcaaacccatcaatgtctgtgcacttggaaataaccatctgggagaagagaagctcctttcaacctagggatgtctatagataagaatgaaattgcaccatagaaagaaagcatatcaacattgcctgctaccaacagatggcactgttaatggtttgtatcacaactgtatttgtgggaccaatagatttgctaacattctcagaaggtagtctggaaggagaagagcctctgttaaggcagtgaaatgatatacatgctcaattttgtttaattatcttgtcaaaattcctggaaaaaaataaaaaaatatatttatatgggatatttcgtttaattaaaatacatcatcttttaccaaaattaatatatgtgaaattaaattgtagtagaactttaaaacaacatagagttcctattgctttgaataattggtctttacatttagtattatattatatgttatattgttatgtataccatatatataatgttatattatatactgtaatattagagtagcaactgatactcacaaagctaaacaactcagttccactgaaatataccagattttgacttagttttaaaagggaggacctagaaacagagagaaaatgcatcagtgggtaaaatcatttacctctaatgttttatttcacctctatggtttttagtgtactagagagctgtttaatcagaccattaccaaattgaataaatggctacttagtgattactgaactatttagtgatggggttggggagaactccttttttaaaaataagccttttgaatagttcatataagaccatcctaataaataaaatggaacagaatgtgtttgccatgtaatagcttagtgatttttaatttctgtattgtgatgaaacaaccagcttttctagaatgtagccagtcctttgtttctcagaagctgtgcacacttgcggcattcagtcctagtgctgccataacagagtttctaaacactagttcagaaatgagacatttttgtttagtctctgtttgggcacagccaagagtttaagactgtacatggagagaaacttgcttttttctgtggatgtaatccaggggacctgttgaggtctttaatgggtggctgacaggatgaactgggcattcaatattaaagggtggtatcatagcaagggggttaccccagcagagtttgtagatcaggaattgtttagagcctagatcttgggaaagtgaacaagaagcatgttaactaaagataaaaaacagaaaccaggtattgtctttttaaactctgagctcttggagtggcgatcatgtcttttccatattagtatctccagtgatgagcattgtctgttggagacactcaatatacatttcttgaatagagtaaggatttactggactttgacacagaactaaggttctgtgtgatagaggtctgtgtgcttatgagaagctggactgtgtaggtgaggatgctaaggctcctgttcccatagagaagtccttgagatggctcaagctgctggttcccttttttcttggactttgcaggtattcaaggtgtctctagttagaagctttatgttttgtaatgggtaaaaatagtgctaaaatatatagctctttgctatttataccaaattgagggtctctcagaacaaatacagtggacggattttaataataatagctaatacttatatagggccaaatagttctgagtacttttcatgtatttaactcatttaatcctcccaaaagacttgtgaaagaagaaactctcgttgcccacttctagaggaggatattaggtgtagaaaagttaaacgatttgtccaaagttacatataaattaagtgcagaagctagtttttgaaagcttggctctagcatttgttttttaatcattaagccaaacatcaaattccccttcccacactttttttttcacttttaccaaagaaatatcttaacaaaatgactcctttggaggaggaatacatgcatatatatatctgtgtatacatgcatatatatatctatatatgtgtatacatgcatatatatatctgtgtgtgtatatatatatctgtgtatatatatatacatatatatatgtgtgtctgtgtgtgtatgtgtgtctgtgtttctgtgtgtatatgaggtcagagtgagggccaagaagctattttttctctaaagtggttcatatattgcaagtgatttaattgagggaagatatagttgtattagctaaaacacttaaaagtttataaataggtgtgtctacacaaaggcaaacattcctctaatttctaaacagtttttacttctattgaattgaatatgcctaatattttagtgtcctgatgattaaagtatgaggaatgaattaataaccaggttcaaatatgtgtattgttaccatgcagatctgttaatacttattaattcccacatcagtgtgaactaaggaaaatgaaattaagttgcattaagaatgtgctcagttatatataaagatttacttcctgtaagagtgattatataattatatggtttactaaaatagttatgagattttattctttcattcatttgacatgcattattggaatcttagtattttcaaactacgtatttggagataaatattgcagtctgaccataatgatagtttaggtattccttggcctggaaggaggacactagttcattttattaacatgttctttgtctgtggagagcctccacaatgccattttagtaaaatactggatctttactaaaccatggctaccaaagacaaagtgtcattctaggcagccaacagacttcttgccctactcctgacaagcaaaataaaatagcctggggtaagagaggtaatggccatgagttaagtcattttcatagttatgctaaatcagcttccctcaggagcacccccttcctttcctttctctgtttaaatgaggtggagtatgatgtgactattccagcacactcaaaattagatgtgtgatcaagtattgatcttcaggaagttcctaatcctgtctgatgttttctgtgttagctttttttttccttctgtcataatgttagattagccagcaccttcattttgttattcccttactttttaaggcaggattcttctgtacaagaaccctgaagcgaccctaatattgtatccaaaatgtagggtcagaatcaggagtggagactgtgagttcattgtgagttaacagtctattatttaaaagtgcaacaagaaaaatagttttgctttcattccatttctgggactctaattttttccaagggagtctggcataaagtatcgtattggtccaattgcttgggatccactgagattgttactagagagggctttggtgtaaaaccccagagtaaaattctttaatgtccttttgggtcattgaacactttctaccattatgcttgacatggacaccattgaaatcattccaaggtcaaggtcactcagcaattttactaatgcttcaagttagtggaattttatttttccccccataatgcttgttttacaaaataaaatacagtatattttagtagatattgtaagatcaatttttgaaatttcttttatcaaaataaatataaattttatgaagtatctgtatgtttattatatgtaaacgtgcaattacaaatatgaaatataatttatatacatgtatctatgcatgcacctggatcttatttgaggtataaaacatgaaactagaactaatgtgttttacaaatatacgtaaaaagttattatttttttaattttatagaaacacagagtaagtaatgataaaaattcatttgtattaaaaatatttttataactacaattagtactaacattttgctttagcctaagcttaaatgctttatttgctagagtcacttgttaaaatactaaaaattttacaaggtatgaaggtaaaatagaaattatttcaaaaaaacaaaaatgcatgctgaattttctcttttcctttataaaacaagcaagtcctttatgtagatttctacaattcataattcaatgtcattaaatggcattcaatttatattttagactattatgatttcaatttgagacacaattgttttccaaatgaattcaatgtggggtatatttatgtaatagatgaaatgtatttcatctattttggaattgaataaattcaatttattcaattgtttggaattgaataaatacagtacgtataaagggaggatgaaaatgtacaactattggatgttgatagaagcattctgaataagaagcatttttacaataaactcaagtatatttttataatgtactttttaataatacactgattttaaaagtcttttttataatgtactttcatatattttttcttgagaaatcttgatcttgtattgacaattgcataaatatatttgtgcccagcacaatggcttacgcctgtaatcctagcactttgggaagctgaagagggagaattgcttagtccaggagttctagaccagcctgggcactgtggtgagaccctgtttctacaaaaaagtcttttaaaaattagctgggtgtgatggcacatgcttgtagtcccagctactcaggaggctgaggtgggagaattgctgaggattgtttgagttcaggaggtcaatgatgcagtgagctatgatcacgccactacactcaagccttacaacagagaaagaccttgtctcaaacaaaacaaaacaaaacaaaacaaaacaaaacaaaaataaataaatatcttggtatgtaagggcaatttggggttgataatttggagagggatggaaagatacatagatgcctatatctacatagatagagctctctctatacatacggatacagatataaatagatatctatatgcagatagatatatatctatgaaaatacacatctaaataaccatagatatctattaatatctatgtatctgtatctatctatacattttaacttaaaactttatatacacataagcctatagttctatatttgtagctaagtttaaaaagctattcaagggaagccctgagttgttcttttatggcatctggtggcatttcatatttgacgtgttggttgctattggtgtttgcactggtgaatccttccactggaaatttcatttcttcagggtttaccaatcacctaaaatgttttctttctggataatatcccctgactgctttcttcctcttttagcctaaagtttcctaaaaatttaaaatgcattgtagtcagctttacttacctttcacagaatagcaactcaagaagtgtatgctaagaggaggaataaaattatgtaaaaaatgaactagaaacatagttacctaagacaaaaataataagtggacaaaccaagagtaaacattttacttaagggtttaaaaatgatatcaatttttactagttagggacaatgaataatgcttatcacctccactgttatttagtgttgttctggatgatataacccatgtgtaatgacagaaaaaagaattatggctgttgaaaaggaatagatgaaatttccagaaaataagtttatacctaaaaaagccatcaaaacctattataaataacagaagtacaataagatggttagctataaataaatacataaaaataaatattttttccataattcagcaataacaaatctgaaaatgatctgattcttaatatcaattaaatatataataagtactatagcttaacaagaaatgtgcaggatctatttaaggaaaagagaaaagaagaacttataataatcattttaatacaaaagagtgaattagttgataggtagctaaaagcagaattttaaaaatttactaaaaaaagcaattttgtaagtaaatttgtaagtaagaaagaaaactggaatatatccctatctcactttacatgtcaaaataaattacaaattttatatttaatactttattttttccagaaaattaaatataaaaatacagaaaatgaacagaaaaaatataagtaagttacaaattctgggctaggaagcccaattataaaaagcaaaggaagacgccattattgaaaacatttagattttaaaacaaaaataaaccccctttttacatttaaaaataacatttaaaagtcaattgttaaaaaaaagtaaatgactttaacaagtgacagacaaagaaaccatacccttaatgtggaaaaaacgcttacagatcaataataaggatgcacaaatgacaaaaaagtatccaaatgaagaactacgatgaaagttcaaaatcactattcatcttgtaaatacaaattaaaactagaataagatttcattttaaatctatcgaatactagttggcgtctttcagaaatgccaggccaaactattcctgatgctagaaatgttttgcctgacagtggctgaaaactatttataacatatggaaaggaaattacacaacttgagaaatttcttgcagtgaactcagaaatgaaaaggcggttagatgacaatttcagttcattaatttataaattcacatgctaccacagattttagagatcatgcaattcagtatctccatttaagagtaggaatctatgggctattctgctcaggaaatcagcactatagcatgtatatgtatttcataaagtatctggtggatattactttcttgttttgtttttttttttttttttttatcatttggaggttgtaaagcatgatcagtccttataagggtcacatttagacagctacagattttaatcgttccaaggaaggaatgggggattatttcaaaagacgaaagaaaacattctttgatctaaaagcagaaccaccatttgacccagcaatcccattactgggtatatacccagaagaatataaatcattctaccctaaggacacatgctcgcgggtgttcattgcagcactatttacaatagcaaagacatagaatcaacctaaatgcccatcaatgacagactagataaagaaaatgtggtacatatacagcatgagataccatgcaaacatgaaaaaaaacaagatcatgtcttttgcaggaacatagagctggaggccattaccgttagcaaactaatgcaggaacagaaatctaaatactgcacattctcacttataagtgggagttaaataatgagaactcatgaacacaaaggaacaacagacactggggtctatctgagggtgaagggaggcagaagggagaggagcagaaaagataattattgggtattaggcttaattcttgtataatgaaatcatctgttcattgaacccccgtgacacaaattcatgtatgtaacaaaccttcacatgtaccccacaacctaaaataaaagtttttataaaacacatttctttgttttatacagaccagaatgaaatcatttctcaacacttcttttacattaaagcacattattcttgtttttttcctcaggtattgccctactttttaatcctaatctatagttccattgtaatttttagaatgctaatctaatatttattgaattcttttgtagtaagcaactgaaaaaaatttaattttcaaaaggaagaaaaaatacatgtttaaataataagataacacaactttggtattctaaggaatgtttggggattcattccagggcgctcatattttcaggttagctttcaactgttattttgtcgagtataatcaatggagattttgttattcatgtatttatagagctggttagccataaatagtttatgaatggagacatttctagcaccacctaatggcagtcaagtaaaaagaaaaagtttttctaatttaggaactgttttgcataatttaaattaaactatatagccagagttacttccatatgaaaatgaacttttacattccctaatgcactaactaggcatggaaatccatctctgagcaattggattgagtaggaatgaagctgaagggatatttgataatgaaaccaaggggtttctgctgtctttatgtgtgcaagaataagaaaatacctagctaatagaataaattaattttatgtgaaaattttctttttagtttcagaagcctatgcatactagattttccatactgtagtttcctgaaaaaagtatattttgagtattgtattggcatattttatttgtcttgtttttcagcagttatttatacatctttgaccaatttattctactagtttaataaagcgttttttaaagtttctgatagtttttttaaactgagtcatatcattctgattataatattggaattttctgttgaatatgagtcaaagaacatgctttagatccgtaagctctactcatttatttcatgtgtttcctagcaggatttgaagaatgtgttgtctgtcataaccctaggattgagatcaatggatttggttaatgtatccgaaggagaaggagaacttagcgatagcagcagattctgacacctttcatcctcgtctcaacactttggtttgatactttcttctatgatataaacagggaatactaggcagactgcagatacaggtagttttttgtttgtttatttgtttgtttgtttttgagatggagtctcactcagtcacccaggctagagtgcagtggcacgatctcggctcactgcaacctccaacctccgcctccaggattcaagtgtttaccttgccgcaacctcctgagtagctgggattacaagtgtgccaacgagcccaactaatttttgtatttttggtagagatggggtttcaccatgttggctaggctagtctcaaactcctgacctaaagtgatccgcttgccttgacctcccaaagtgctgggattacaggcgtgagccaccatgcccggccagatacaggtagttataaaaatcaacaagaaagagacagtctggtggtggtagtagtttcaagaaagtgctttctcttcgactgcaatttcttcctttctatgaacatttatttattgatgccctgtaatgcccttcacttctttgtgcacacactgaattttaattcagtcttcacagtcctgcttaaccatcacagcttctgtgaactttttctgtatatcattttgctctcatttcaacaaaattaatcacttttgctattttatagctgtagattacatatccctcttgtactgggtctttataatattttgtactcatttggatacaaatacttctactgctataggatgggtttcccttaaagtaagtattatgcctttcttgtttatctttattattcagagcaaacatgtattttggtgaaagcaaaggcaagttaatggaactgatgtatctttaagttattgtctactgtttattttctctagttttatgttttaatgtaggctgatgttttcatttcttcctttcattaatccatttctttattactgctaaaagttaactagtatttgttgttagttttttgttttcttttgttttagagacagggtctcactatgtcactatcttgcccaggctgtactcaaactccttggttcaagccatcctcctgccttggactcccaaatagctgagactataggcatatgacactgtgcctggctgggtttttgttttgttttgttttgttttgtttttgttatttttaacatcatatgatacttgattgacttttctaaacccgtggattaatatctgcttctaaagtaaaaaattgttaaccttgttattgaaagctagaaagagaaaatgtctggcttaaaggctatcctaaatttttgaaaaattcttatgagaatataatcatctatataaagggtacatttggaaaatacaggtatatctttaagaaagattcagaatttacaagaaaaaatattgaatatgaagatgattagacaattgaacaaatatgtagataaatacatcaatttttacaaaacatgaaatagcattaaaaagagaagaatttatcactgctatcacttatcactgttgcagaggtccgattaatgcagtaagaaataggagtttaaaagttggacataaattgatcagataattattattttctgataatatttcctgtaaaatccaagataatccactgaaaatatagaaccagttgaacaatctacaaattgactggagtcaagagaaatatatataaaacagttgcattcctgttctcacaaaattactcataaaataattagaaacttctgtttcaaattgggatgtagaacagtaagaaagaacttcgctttcatggtaacaacaagaaaaccagactaaagaaatatctttttctatgagtctgtcaaggagcaagcaatgcagaaaaccctggctgaattgaattttaggaagaaataagtgcttcataggtgatcagagtgctgtggcagcttccatatctgaggctaaacacttgttcagacagcggaggagtatgctattgtagatggggagaatttttaaggtcaaggggaaaccatccacccttagacaacaatgtagcctagtaagatgaaattagatctaaaagtctaaatgccaaagcaagtagctcagccccaggttacactattatcctccacacttgaattttgctaagataaagtcagttgaagaggccctagaagtggattcctatgaaattttgccatgattggattccagaattatgaataaatttaatccaaatatgagccaaaaatatttatagtcccagccaagtcccccgctagctcaaatgaggataagatccaaaaggtggcatcaccaatggttgaaggttgagctaaacacaagtgaactaaatacaattaaagcccaacttcagttctacataagtcagtagaaatgtatccacagattgccaaattactgtaattagaaagcaaagaatttaaagcaaatattgtaaacatttaaaaaaaattaaaggtaaaattcatataatggatgaaaagataaaatattttaagagataaatgatagctctaagaagaaataaaatggaaattctagatctgaaaagtataaatttacaataaaaactttattggataagtataatagcaaattggtcagtgcagaataaaagattaatgaatttaaacacatatcattatgaagtaaccaaagaaaaatgaagagaaaaataggttaaaaaataaacagatcgataacatgtggaataatatcaggagatttaacatacatggagatgtgggttccaggaagaagaaataggcagaaaaatatttgaagaaataactgttgctaaatattcaaatttgatgatgaaacaacctaaaaatgcaagaagctcaatgaattccaagtagaataagtataatatagccacatattgtatactcacagtccgattactaaaaaaaaaagattatggaaataaaaaccttaaaatcagctagagaaaaggaaaaaggcactacatagaagaaaacaatgaaatgaatgaaggctaacatttcatcaaaaataattgaggctagaagataatacaatatctttagaaactttaaaacaccaatctcaattctatattcagtgaacgtattattcaaaaataatttgaaagacatttttagattaaagaaagagttagtatatcatgaatagtcttgcattacaagaagtgctaaaaaaagttttaggctaaaaataccaataataactcaagtgtgaggaaaaaatgaaggaaaatggaaattaaaaatgtgaataaacagaaaatattattaaaaactcttttgaagacatttgattagtgaaaacaagaaattttaaacatattctgcagtttacaacatatataaaattaaactgtataaaaaatagtacaaataattggacaatggtaaatggaagtatgttgctgtaaggatcttatatgtgaagtagtataatgttaatttgtgatagtatgtgtgttaagaatgcatatgatgatccttagagagccattttaaaaagtctaaagtctacctagggagatgaaaaaggtagcaaaatggaatgttaaggtaactcctctaatccataacaaggtagggaaggcacagcaaagaagcaaacagcaaatgcaaaaaaaaaaaagaagaagaaagtaagaaaagagagaattcaaatagcaagatggtaaaattaagttaaaaacatattaataattatgttgaatataaatgcacataacacaacaatcaaaaagaatagattattaaactggctaaataagcaagacttacaaagggtgtacaagaaacacacttcaagtataaaaacataaaaagcttaaaagtaaaaggatggaaaaaataaaccatgaaacatttatcataagaaaatggtagtggcaatatttatatcagccaaaattacctttaagaccagtaatattactaaacagacattttataatgatagtcaattgattaagaagaaattatcctaaatgtgcttatatgtagtaatagagtttcaaaatacataaagcagaagtttacaaaccaaaggacaaaatagacaaattcccttctatatttcaagatttttaaatgactttcttagtacttaataaaagaagttgataaaaatctataaaaatacagaaaaatcaaacacactatcaacaaacttcagtgacagttattgtacattctatacaaaactggaaaatagctattgtttttcaaatgtacatggaaagtatgtatatttgaaagtatgtacactacaaacattctacagctaatatgctgggccataaaagaatcttaatatatttaaaaagttgaagtcagaatatattctctgtttatatagaattaaattagaaatcagtctgaaaatgctatctggaaattttctaaatacttcaaattaaacaacacatttctaaatgccctaccaattaaggggaattttttaacaaaaaataaagtataacatgaactttttggaatgcaccccaagtaaggcctggagagaaatgtataggttaaatggttatcttagaagaaaaaagtccaagctttcctaagcttcttcttaaaacaggcaaaaaagaacaaattaagaccaaagtaataagaaatgaaaaaaattaaggcagaattggatatcaatgaaatggaaacagaaagcaaagcccagaattgatttgcaagaattatgggtgttggggaatggagagtggtaaggggagagaaggaggggggagagagaaaaggagaggaagagagagaaaaaaatattttggattaattttaaaaatctatcgatatgatttaccacattaatagaggaaatagtatagcaaaatatcatattatctcaatacagctgaaagacatttcacaaaattttatacctattcataatgaaaactttcagcaaactaagaataggagagatgaaggaccactacaaatattctacagaatacatatacatatatatatatatagtatacatatatgaaatgtacactacaaatattctacagctaatatgctgggccgtaaaacaggcaaaatatatatacaatatatatttaatatatatttattatatatacttatacatacttaatatacttatatatttatatatataaatatataaaagtgaaatagtgcatgttttgattttaagatagggatcaagttttcgttcaaactttaccagtagttctagccactgctaaaacaatacgataatataaaagtcataaatatagaaaaggaaaagaaaatgtatttgtcatcgacataattttgtatgtaaatgctttaaaaaatctttgaaaaagtgttaaaactaataaatgaacttggaaagattgcagaatacaatgttaatataaacaaaattaattgaacatactagcaataaacaatttaaacaaagttggatttaaaagaatattcaaaacatagcacttaaatttaacaaaataaatgaaaatatttgtatagccaaagctataaaacataacttagaaaaatcaatgtaaacctaaatagatgaagatttatcatgtttgtggatgaaaaacaaaatattgttaaaatagccattttcctgaagtcaatttattcatttaatgtaattccaatcaaaattccagcaagcttttttgaagaaattcccaagttgattctacaagttgaaagacctagaatatccaaaatactattgaataaagtattaaaaaaatggcaaactgagccatcttatttcaagatttaaaataaagccataataattaagacttcatagtatttgtactggcaaattaatcagaaatagactcagacttccaatgtcaattaaaatttgatagaggtaaggcagttcaatggggcgagtacaatcttttcaacaaatagtactgtatagtgtataggagtcaaaaaaaaacaataaagcttgacccctatctcacatcatgcatacaatttaatttgagatgggttcatagacctaataaataaaagctgaaattataaagcttctagaagataaatgagaaaatatcttgatcatcttggtgttggtaaagatttctcagacaaggtacaaacaaagcgctaaccattaaaaaatggtaaattcaacttcatctaaaatattaagaaaatgattgccattctaactgatgtgagatggtatctcattatggttttgatttgcatttctctgatggccagtgatgaagagcattttttcatgtgtctgttggctgcataaatgtcttcttttgagaagtatgtgttcatatccttcgcccactttttgatggggttgtttgtttctttcttgtaaatttgtttgattctggatattagccctttgtcagatgagtagattgcaaaaaatttctcccattctgtaggttgcctgttcactctgatggtagtttcttttgctgtgcagaagctctttagtttaattagatcccatttgtcaattttggcttttgttgccattgctttttgtgttttagacatgaagtccttgcccatgcctatgtcctgaatggtattgcctaggttttcttctagggtttttatgcttttaggtctaacatttaagtctttaatccatcttgaattaatttttgtataaggtgtaaggaagggatccagtttcagctttctacatatggctagccagttttcccagcaccatttatttaatagtgaatcctttccccatttcttattttcgtcaggtttgtcaaagatcagatggttgtacatatgtggcattatttctgaaggctctgttctgttccattggtctatgtccaacaatgacagactggattaagaaaatgtggtgcatatacaccatgaaatactatgcagccataaaaaatgatgagttcatgtcctttgtagggacatggatgaagctggaaaccatcattctcagcaaactatcgcaaggacaaaaaaccaaacaccgcatgttctcactcataggtgggaattgaacaatgagaacacatggacacaggaaggggaacatcacacaccagggcctgttgtggggtggggggaggagggagggaaagcatttggagatatacctaatgtaaatgatgagttaatgggtgcagcacaccaacatgacacatatatgcatatgtaacaaacctgcacgttgtgcacatgtaccctaaaacttaaagtataaaaaaaaagaatcaaaactttaaattaaaaaaaaaatgaaaaggtaagtcaaagactggattcggctaggtatatgtttaacttagagaatgccaagcagttttccaaaatgattgtttaattttgcctttacattagcatgtatgagagtttccattgcatcacctattcagcagattttggtgtttttaatttgaccaattctagtgagtatggagatgtgtctcattgtagttttaatttgcagttcctggatgaatgatgacactgaacatctttctcatgagcaaatatggttatttgcatatcagaatttttagtcaagtgattgtttagacgttttgctcattttctattgggttgcttggctttttattgagttgtaggatttttttatgtattctacatgtccattgtaagaatttaaatttctgataaaagattaaaaaaatctatagtaactttttagcagctttttcattcatactagggacttgtattacaggttccttctcttgatttggattttggaaggcaaaattttcatcagctgaaatgtattagttcttgatttctttttgttcttacaatagctttgtatggctattacttgacaatttccaatcattttgaaatgtcttacattttcctgtatctgcaataacaaagttaagttgacagggataaaggcttttggatggctttttatgtttcttagttcaagagagacacatttggtttttgaaaaatgtttgtgttgaagtctaacatacatacagaaaagtgcaaaaagtagcagtgtgcaggttgacccatttttataacccggatagccttgtgtacccagcacccacagtacaaaatagaacactactgggcccccagtgggcctgccttgtgccctttctaaatcccagccaggattacctctatccagacttctaacatcatacgtggatttttgtctagttttgaacttgatataaatgggatcatacagtatatattcctgtgtacttagtatctcttacacaatccatgtttgtgagattcatgtatatagttgttcattctcattgctatatctgttgtttgtacagttgagtgacacgtgtgtatgtttcagtttgaaggtgtaatgaaaggtcttgctgtaaacatacttgtatatcttgtgaccctatgcatttgggtggggctggatgtagatccaggagtagaacggctggatgaaaacatacatatatcaaaagatacaagggtaacttttttgtttgtttttgagacggaatctcgttctgtcgcccaggctggagtgcagtggcgcgatctccactcactgcaagctccgcctttcgggttcacaccattctcctggctcagcctcccgagtagctgggactacaggcgcccgccacgacgcccggctaatttttttgtacttttagtagagacgaggtttcgccgtgttatccaggatggtctcggtctcctgacctcgtgatccgcctgcctcggcctcccaaagtgctgggattacaggcgtgagccactgtgcccggcccacaagtataacttaataaatactgtcagtttttaaaagaggttgtacgctccaactagtagtttatgaatgttgcatgtatagatattattacattatatattataaatttaacattttactttttaatttaatattatatataaaaatatatgtaatatatacgtgtgtgtatgtgtacatacacacatatacagtagttgcacatatttggctacactttgtgtttccttttcattttagccattctaatggatatttagtggtattgcatttcattttgcatttctcagatgactaatgataccgaccatctttttcatattttttttttctggctatgtatcttggtatcagatatatgtattgcaaatatctgctttcactatgtcatttgtcttttcattctcttattcataccttttgatagccaaaagttgttaattctaacatggtctaatttatcaacttttccctttatgttatagcttcacatttatcgtttaagaattctttgcctaatccatggccccgaacgtgtatgatttttatgattaaattttaaagttgtaaacctcttacttgaaagttaaatatttccatgtagaacttggatttttcatatttttagaatgttaggccatggatgtaagtttattttacacatctcatgtataccatttgtacaaagtatgtgttccttaaatatttcctgaatgaatgaatatagagatgcatgaaatgctctattgtttaaacactagaaaccaaaacactgaactttagaacatttcctgtctcattttttgaaaatcaaagtctaaatttcagaaagtgagaaaagtataattttcacttgtctgcccattttagtcagtgtttcagcttaacacaaacattaaaagcaaaaatattttggcactgctgggctctgatccacagctcttcttattcctgggcccaggatgataacacattcatgaggcagaggggaagacaagttcaactacacagctgtattaaaatttctgctctcctgcgcacaccgcatgtccactttcatttctttggccaacacaagtcacatcactaagcctaagtcaatagttgggaatctgtaaatacataatcttcttataggaaaagagagtgttaataattttgaatagttatgcatgttaccattctgtctcacggtagagtcagtaatgttttctttaaaatgttttatatgttaatcaaaatattatgtttatatttaaatgtattcttttttatttagttcatttaaagaattgattacatgatttcagcatttggctcaaaagatagaatttatctatatctatggcaataattaattgtcaagaatatgtttcagtgaacgtgtgcatttttaattttgtcatagattttgcacaaaagacattcattatttattttggcagtgtaaagagaaaaatgagaagattaaattatttggaaaatgctgtgggaaagtctcacatacaccatcaattccaattgcctttttttatactatagcttcccttcttaagaaattttccttgatctgtgtaaaatattatattttagttgcactagcagtgcattttctcatataagcataaaacttgaaaattaaataatatattttagaaaaacacacgaacttgcatatttcttaaatagtgcataatttttatgagattcccacgtatatcttgtctaaatattcctgtaattcttactgatttattttcattcatcagatttctcttgaattaaagacaagtagttgtcttcccagattgagcaattattgatatcttccaacacccaattccttgtttttattctcctctctactgccacatagatgactccaacacactggtagagagttttgctctcttcatgttccaaattatagcatttttgtgaaataacctcaagctgagtaattttataggaataggttttattataatatatgataccaaatatcacataaaaagtggtgacagaaagataagatttctcaagtagtgttactctgaaccataaggagagaagcttaagagaagaaaagagttggtagaaatataattgttctctgctcaggttgtagaccagactctacgtctatgtttctgctggtagatgcttccttttatctccctggtctaccctgataattaatttatatgtctcccatttctttctctatcagatttttctaattcgtgttctgtacccaccttctactcattcatttcctcagtccttatcacccagcagtcaagagtctgtccattctacttaactgaaaaagattatgtcattaccagctccgtaagtttttcttcagttctaattattctggacctattggaagtgtttacacagttaactaaccttgcctccttaaagttccctcctatctagatttccattttacaatattatcttgatctaactttattcttgcccttgtttttttcttttctgaaatgtggacatttccattaaaggctcttgttctttttctacaatctgtctcttagacatggcttttgataggtgattgccaatgtattttcctagcatcgtcttctcttctaagatttagtttctcatttccaaatggcaggcagagttttctgcatcataagttcagtatgcctaaaactaaagataattcctaaccccagatttccttccttatctgacatttctatttctgttattaatgccccattttcctcaataattggtgaaaagaatggaccattttgccccacaccatcacctcatatcaatatgtcttaatgtgcctttcctggtatgtatagagtttatcctttcaattactaattcagttacttgtctgtccttgtcttattctcccaaagcacagcactcacctcttttctgtgtagctaagttacgtctcctccctacatttcatcatgaattttgttgccttagtctcaattttgaaaatcctattcctgctctccactcaaattttaatttcttccattaatttatgggatatgtttcaaatgggtggctcaatcatttcagtgcacttaataggggagatgagagagaacaatacatctagtagcaggagtccaagtgtgtttgactactgaaaagcaatttgttggggcaaacaattctattctgtggagtggaagagttgccaggaaggactgcatcctgaatctgacagcaagaacacaacattcaagcaggccagagtaagagaagaagagagtgtgtaacaatgagaaataaaaatcactaggacaagtttgttgaaaatgaccaagagcataaaacgtagaagatggagatgcagaagtcaagaaggccaggataaatttgatttgccttcttggaaagtctaaagcttgtatcctaaacttaacctttgctgtgactaaaggaatagcactctaaaaatgacttagaacacagcattctttttcatctttgtcttctatacaaacttctcaagccagattgtacagatgtggtctcacctatttctccagatttatctaactgtctccctcacaaccagccttcctcaaactttccatacctctaggactttgtacaattcccgccaaatccttcatattctctaaaaacaagctgaagtactatattatctaaaactgtcctcaatttcttttaatcaggtattttgtatacatccctataccatttatcacattgcattacatttttttaattgtcttttttctcaactagaactcaatgtcagttatgggcttattagtttttcttctttgctgtgtatcggagtactattcaacaaatgttagtgttccatagatgtatgttgaaaaaacgacagtccaatgttcaccaaatgatatctgctttcctgccttcaaatcctagctaaagtttttctcttcagacatggcttctggagtagttgctgtctattgaaactgagttaaccaccacccacctatgtagggcttttggttaccagcccagcctgaaggaagatctccttcctttaaatttttattatcctgcctgactgtatttttactcaaatcagtattcattcattattcactattgtgttcttgagatgttatttgattttcatatatggtcttgagctcttatttgattccacaggataatttgttaagacatatacatttaatattttcaactaaactggaaattccttgaaaacagagattgtgtctcttaccagttttaatgcattaagcaaaaagccttatacagggcaagagctccacagtatgtgttgagtacgtgggatactgagtagagtggagatggggccatgtaatggtaggactggagatggggccatgtaatggtagggggaaggcatcattcataggactggagatggggccatgtaacggtagggggaaggcatcattcataggactggagatggggccatgtaatggtagggcgaaggcatcattcatagggctggagatggggacatgtaaaggtaggggggaggcatcattcataggactggagatggggccatgtaatggtaggggggtgacatcattcatagggctggagatggggacatgtaatggtagggagaaggcatcattcatagggctgttgcatattgcccctgcttcctaagctgtggaaatttctatgagaaaagagcattgtatatcctatgatatgcagggctagtatgtgctctgaagggtcagtaaagatcccaaaattctgaaggctgcaaaccatttggttatagggtggtgtttcaggaaattacctctataggcctcttcatggcaggtctttccaatattaacttctattactgaaccgattctttaaacttcataaatattttaagcaagaccctctgtgtttctttcactcttgtcaaaaacccatttatttttatgactctctgataatgttttcacattgatactctgagtatccaattttgggttgacaatatgtctttttgggttgatgagttttgcataaatttaaacttcattatatattgattagcaggaatgtgggcataagattccaagtactgaatggcatttaaaatgggatatatttaaaaccaaatggcctagaccatgcgagtatattgctgtgtataatttcctgactgtactcactacatcataaataataatgaaagtaaatgtacatttatcagaaagaatcaacaaaaccccagcactgatttgctgatcacacttgtcttaccaggcattaaggccagctttcgaacaaaagtgcctgaaggtttgattgtctttgcagcatcacctggcaatcaggaagagtattttgcacttcagttgaagaagggacgtctttattttctttttgatcctcaggtaaatgagaaatcataaactttaatatttttaagaatttagtaggtgcctggtactgaggtaaatgcttctgttttcacactgaatcttcattcaaaccttgtaaggtaagtactattattatccccattttgccaatcaagaaaatgaaacttacaaaagtaatgtgacttgccctcagctaaaatagcggagctaacttttaaaccatcatggtctgactgagaatctgtgggcttaacaaccaaaatgccaccttataatgaagattaaaacttttaaataaatttaaagagatctatttttatttttcttagtagcaaaaaatcatgtccccttttcttccttccctgtctttcttttttcattgtttcaccagcaaatatttaagtggctatcgggtactatggtactgggcgttgcagactaccatagtttcaaagttaaatatgaccatgcccctgcaaaggatacagtaaaataatcaatttaaaattcttataaattgtatcaaaataaagatttaggattctatgtattataggaacataaaataaagaaataaattgttttctgagttgtcaattttctctggaaatgtgatatttaactgagatacaaatcaatgaagaaaagttggtcaggacaagattatatgtctgtatttgagggtgtatatttcaggtggggcagtacaggggagattctgatctccacctgggaaggtgctgagcataaagtttccaggcaaagtgagcagcaaatattaaggaaatagcaaatattaagtgcctgaggtggacgagaacatggcacattcagtacactgagatgaatctcttatggctgggaacagagacaaagggaaaggtggtagattgaaaagctgggtagaaaccaagtcatttaagaccttgtaagcaaatgtgaggatatgaatttttcctaagggcagtgagaaagcactgaacagttgtcttcacttgagttgaacaaatatcagtgagcatttgatattaggtattgtattaagcatgtgagatgagtaagagaaatgagtaagactaagtaaaatatattagctttccattttctcagttcttcaacttaaaactgatgatctaaatcacacgttatgcttgacaaataaatgttttacattttattggtaaagcagacacaacgttcaccctctgtatccaagttgcgtctaggatcatggactgagtgatctgactgaggatctcagcctcatgaaccctggagatccattgaccttagagagaaaaggcagggcctattgtaccaagtgtatctgaggaccctgccagactcaaaaagcaggccaaagtcctcctgctttatgaagctgggagagccgcacagtggccactcgaaggaccagggacagaaaggctccctcctcatgacttgacagggctctgctaactccctggctggtgcacagcaggtcctcagacacaaagatttctgagcgtcccctagtaatgcagcttcttaaaggatgccagcaggtgggcagtgagtaagcaaaaggaaatagcatcacacctaagcagatcctgcagccagagggaaaggaagaagcagcagctatcgcagaaggcaagacagatggcaactgaaaaaaatttttaaaaaatcagctgaagttgattcaattacataatggaagatattattttttatttgaaaactttaagtagattaattagaggagagacactgagcctcagattagtaggtcagaagattaagttgaagaaatctctcaaaatacataaaaatgtgacaaaaacaagaaagttagatactactactgtcactaagaagcgaatcggaaggagaacaaaaagcacatgctcaagaaaaagagggataacataaaatgatgaaacaaaaaataggagagaatatctgatttaagagggaatttagtataaatccattgaaaagactcatcaatttcctgtcaagattaagcaaaactaatacttctatgagacctctttgtgccaggcattattctaagtggtctctctatacatcagtttgtacacttacatacacacatatgcctatacacacacacacacacacacacacctacacacgcacataaactcatttgaacttttcaacaactctgtgaggtagatactcttcatattcccattttacaggtgaggaatctgggccacaggtaagttaattttccccaagtcacaacactaataagtgaccaagccaggttataaacacaagcaattgagctccaaagaccatgattttagctacagtgctatactgcttttcaacatgaaagaaagatggttgttgatatccataaattcagaaaaaaaaaatccatctctgcaccaggttggaaagaaatatttcagtaagtaatctagccaaaaggaaaaataacagagtcagaaatataaaaagaagaagcatcagtgaataataaatctagtaatattaagttatgcctaaatatttaatgatagagtgactagaactctgttttacagtgccaaatgagaatctttgaaatagaagagaagtatagcaaaggcaagaaaaaaaacgtgaataatcatttgttgctaaaattagtaagatttgaaggagaggaaagatgagtgaattaaaagttctgaagataccagcttagtggcggggtgtgggtggaataagggaatagattatactgacgttttgttttcgttaaataaatagggcaaatgtttgatttcaaatgttatagaaaaataagttactactaataaaaagtgctcttcaggacatccaaattaacaaggttaaaaaggacagcaaatgctaagttaaaaaatcaacaaaaatcagaaaaagaaaggggagagtacagtaaaatagaagactgtcaatgagaaagaaaaatctggctctgctttttccccttcaacctgttagtatctggagatatttaagaagaagccagatggaaaaaaaactaatcacaggaccacttgtttatagagctttaaagtatacaaagtgagttcctgttaatgatctcatttcattcttgaagtagccccttgaggttgattttgttttcatccctgctttagatgaagtggcttaactacggtcatagagtggtttagggatagaactagcactgaattcaattatttgaatagcactgaattattttattcaatgaaactttgctaagaatttattggacttcacagttatgcactgggaacacagaaatgaacagaatgacactcattggaattctggccattggttgttcatcacagattttgagtatttatagccacccccctaccaaacatgggacagtcattggagaattaatccaaaaatgatttccccaagtctgaagcatgactgccatctcttttgacatgtggtgttgctatttctaaaggatgcgataccttaagactctgtaggataggagggtaaaggggtcaaactgcttaacggagaatggctgccaggaaactcatctggcaggtctagttgttttcatatcctttacggtgatcacctggacaggctggtgcaaagcgtggtaacagaattcagggaaacattcacagggcatttgcccatcatttccgcccccttacccttctcattcacacaattgcttagagtactcgtcactgctattagttttcccagttgctctgtccctaccctgtatagccaaaccctaagctgtatacatagtccgcaggtgccagccaagtattaataaaattgttaaagccactgggcgtggtggctcatgcctgtaatcctagcactttgggaggctgaggcgggtggatcacaaggtcaggagttcaagaccagcctggctaagatggtgaaaccccgtttctactaaaaatacaaaacttagctgggcgtggtggcaggtgcctgtaatccccgctactcgggagactgaggcagagaattgcttgaacccgggaggcagaggttacagtgagccgagactgagccactgcactccaacctgggtgacagagtgagaccttgtctcaaaaaaaaaaaaattgttaaagccaagttgggggctaaagggagtgaggaaggtttaatgatgtctagtaagtaaatttttatctgaaataatctctctccataaggtaaaactgcttgagttttcaggaaagtgacaattattttttaaaatacaagatatgggttgagcaggatggccttaggatctagctgagaaaatgtaatcagatgcattacactatgtgctcacgggccatgaggctctctatatatgaaacaacgagcttatgctagcaaggactgtgtccttccttacttccaatgaatttatactctaaaacaggtactaaacatattttctaaatttataatgaaagccccactcatttttagacaaagaagtgttaaaactgagggatggtgaaaattttgaatactcttctcttatttgctctctttttccaaagtaatatcaatgcagcttcttgtatgaagttagagctactctgggttttaaaaagtatagaagtttatttcatatgccttctattggcattacatttatttatattttaaatactttgggtaccactttaagtcagtttttctcctttaatctttaaatgcggacgagattatctagtgaatactttttatactcatcacacaagtaattatgtacttagtgtgtctgtcttatcagactgtatgatccagtgagggcaaagtctatgaatcttttgcccacaggtacttcctcaggacttagaacagtctttggaacatagtagatgcccagtaaataaatgaccattgacatattacctggctgattgactcaataactgttggtaggatactactactcataactgaagaaaattatccatttttctggcttacaacgtctagctttgtaatgattacacagatattttgtgatgtttgttttatttttttttattttgaaaaaattagagaaaaagtcttgctgttttgctcaggttggtcccgaactcctggcctcaagcaatcctcccaccttggcctctcaaagtgctaggattacagacatgagacaccatgcccagccttgttcaaatttgtctgtttttcagataatttgatttttatcaggaaaaaacgagatgcttatttttaaattgtttttactgaattcattcaaaatagccaaattttgaattatgaagagaatttcaaggaattttaaagtagttatctagcacatatttataaaataacttgaagtcattgtgtactttgctctttttaaaatatcttaataaaattgagtattaaattccttacaaaacaatttaatacaacgtagaggctatagatataaaaatgtatttggtttgtcatccaactatccgaagcattctattgaataaatgtttagggaaagggagattcttcatagtacataaaattggaaatgtgtttgtatattacaaactgggcacttgccattgttaaaagatacaataaagaaaagttaactgcaacttttaattacagtttttattgttatctccaacaattttctataattttcccattcttcacttaattaaattcaattttgaatatacttgatcagataatattttagtgaccagtaatgatctatgtttatcccttaaatattctatgttcagtgacattaacaggaaattcacatcatattctgggcttacttggaaggaagctgtgaaaatgaaagctttaaaacaattctgaatagcatctattgaatgtgtctgatatgttccaaatagaaagaacaacatgcataatatgacaccagaagtcatcacagaattgttctttcaacattgatggggggaagtaatcttaaaatagtcttcaaaaaatgatattctaaattgctgtaagtataaagtgagtttgtcatgctgaggctgtaggtaatgtacttgaatttgtctccaataaacttgatttctgatgtagagaactattaatgcttcagattgttgccaaacaaaatatgaagaaccacttattcagacacctgatctttagaatgcagcatcgtttgtaacaattttaacgctaactaagtacactttgatgagacagcatttaataaaatgctcattaatttcatcattagcaagggtatgctaagaagtaagccagtttcttatgtcacgcccaattagcatcccatgctagtaatcccattagtattgttgaattcactaatggaaaaactaatgggcatgctaccagggcacattaattgggcacgacaccagttctggttttaattattaaactacgataatgaaatgtgtgtttgtaaaatattaaaatgttgaaatagggttgaagaaaataaaagggtgtgtagacaaaacagatataaggaaagtcaacctacaaaaatacgaagactagaacttgccagatggtcatgtttctagctgatggagttgtctgtaaaagttgggatattgtccatgtgagagacaacccactcatactcatgggaaattaaaagctttttttttttttttttttactttggtaacatgaaattctgtatgtcatacatgttgtcgagctctttatgaggcccgacaggaaccaattaaatgtgtagagtggacatgttgtatcactgaagccatttcagagaaagataaacagaaatcatactaaagatggtatgattaacattgtatgtttttcaatatacatcttcagcaccattacatcaaacaattatctattttctctttttgaaaaaaacagcatagcaaaattattagagtttggtgaaattttctggtaattaagtgttttggtaatattttacccaatctaatttttttaatttttaaagattttattagaatgagctttattcttgttaagtaaatcaactttattaagaagaaaattcattcccatttagaagttgtaatttcttttttatttttatttaatagtagtactagtagctgttggtgacaaagttgggatatctttcacttagtcttattcacttaacacagaaaatgttactataggtaaccaaggctactataacatactggaaaattgtttacttttctcgaaagtagtgagatggcaggtgtttcttctatttctctttctcagtttttttttttattcttacctcctatttgctaaactctgttcttaatatctgccatttcctatgtcttatcacttaggaacatgtttttaactattatatgattaccttagccagaactataattattggattttaactacaaagcattgtgtactacatttaactccacccttatgtttaatgtatcacaactggctagtttttaaggtgaatgtcattcccatttgttattgataattttgtgaagataagagtgacttgtctgacatctctctatcttcagaactcattttgagtggtattttatgagttttaaatttttctcttctttttcatatttatgccatgaaacttaaagtctaaaattttagaatagaaaattctttacccttctgatgaatagctatattcatcagaaaatgcaagtgactttgtaagaaattcttactgcaaaggtgagacctttacagatctgtacactgtggtgcacagggaagtattaatacatcacaggaaagccagaatgatgctagacatcagctttaattttgagttctgtttgaaatgtatgcatgcttgtatcaggatcataatcttgaaacttgtaaattggtttataacaaatatgtgtgtgtttatttgtagatatgcatgtataaacatttatttattcattcattcccttaaggggtcaccagtggaagtaactacaactaatgatcatggcaaacaatatagtgatggaaaatggcatgaaataattgctattaggcatcaggcttttggccaaatcactctggatgggatatatacaggtaagtactttttgatatgtataaatagccctgttgatatgttggtgttgccatacttttctgttgtttatattcctacattcttatttcaccataatttctactcaattccatatatattgctgttgaatttgcctttgggatgctcctaaaaggatgaagtctggcaaccagtttttcatccatgaaggtctttggtaaagaaaaaaataacaatgaagtcacctatgtcttttacagttctttacaattcgtgtggacctttagttatgttctgtcatcttacttttgacttccaaaaaacacatacagtagaggaaagcagtttttgtctgcatttggagatgaggaaaccaaggctgagaaaaaagtaaatattttttcctaacttacacagttgagaggaagcattcttgggacacacatcctgttttttcacatttaagtttagtttttgctccagcctaccctatctgccacatttatgtaattataacatgatcactgtacctgtataatgatgcaggcttttattaaattattcaggaaatatctaattttaatcagtacctattatgttccaggtattgttctaggtgctctggatacaaggagcaaagagaatactgtaaaacttacattttatgggaggaatggggcagcaaaatacagaataaataaatttaaacaaatatcaagtggtgataaattctgagaatgaaaaagccagatgagagggaaagttgtgtgtgtatgtgcgtgtgtgtgttaagaaaggtctctctgatgaggtgacatttgagcagagacctaaagggacaaaggggaaaccatgtaaatatccaggaagaggatgctttgggttgcgaggacagcaagtatcagggccctgaagtgagagcacactacatgtggcatgtcaaggaccaacaagaaggccagtgtgggaaagagggtgtaaaagagctaatgacatgacataaggtcacagaggccattagggatcagattatatgggaccttgtgggcttttactttgaaagaaggaaactgttgaaggattttgagggaagaatgacataatatgacggctttctttaaaaggatcacactagctgctctgttgagaataaattttaaggggaatgagggtgaaggcatggagatcagttaataggcttctgcaataactctgtaataattcagacaagaaatcatggagacctgaaccagggtgataattgaagatataataagaagtattcagattctggttatactgtgaatgtcaaattaacaggatttggtgatgagattgaggcagaataggggttggtaaactatcaccatgggctaaatctagctcatgcctgtttttataaagttttattggagcacaactacacccattcatttacgtattatctatggctgcttgagtctgaatagtctacaaagacactgtctggcctttgacagagtttactggcccttaatgtcgagcaagcctgtcaggtttgggtctcaggcaactggaagaatgtagctgccaaaaccagggagtgcatgactgtgggagaagcaggtttggggagagacattcaaagttcagttgagaacatgttaaggctgagatttctaagacacccaaggggagatatcaggcaggctgctcaagaaacaagtctagttctgaagtcagaacttccagcaaaggatggtattgaaagccaagggaacagatgtaagtagggctaattggagtggattgggctctggaaaaacaaacacaaataactttgcctcttctctcaaagaaggtgggcattagaaatatgaacagggatttccattgttatgccacacagtcagagacccaggttcccctggcctttggccctggcagttcgtactggaacccagcccactattcatccctctagagtacttagggggtgcctatgggtagagaaaggaagaggcctgagaggcaggcggtctggatcattccaacatcatgatgctgggatgttgaggaagagccagtgaagaaaagtaatgaacaggcaatgaggagagaggaaaaccaagagagtggtatcccaaaggctggtgaaggattttattatttgctgagctagtaaaactagagtatcctggtgaaggtgtatttctcatctcctcttctctaggttcctctgccatcctgaatggtagtactgttattggagataacacaggagtctttctgggagggctcccgcgaagttataccatcctcaggaaggatcctggtgagtttagtaaggtatattatatgttgtcatccaaacttagaatagaacctgtttacattattttaaagtaagaataagtattatgttctacctcatgctatattttctatattaatgtgccaaaaatttcctttaggtctcttttttttaaaggaaccatgtattccatatgacttgtatttatattgttagtactcggttcttgatatataaaaggaattcattaaaacttttgctgaaatgaattataataatttcagtcaaaggtatgttattttaggacctatgcatagttttttctaagattttaaattgaatgtgaaacaacacagaaatggaaaactatgagcttgatttatactctaaatagggtgaagaacattccctgaatactatgtgataggcactaaaccaatccctagatattcatagatgaataaaatgtggtctttatcacaatagaggtcacaggcgtataaacagacaattccagcctaatgccattagtgctataattgagctatagacaaagtgattctcatatttttagaacaagagcataagaacatattctaaaatgaaactaattaaaatgaacatgaatggaattaaccttagataggaaaaaaaatcacccttcaaacgcaatgctaatattctaggattgtttcccaagtcctcattaagaatcacagggtgcctcccaagtctctcccaggaagttaaaatataactacataaatattacaaataagctagaacccagataagtataatttgttcatgggttgcagtctcagggaatcatgatgaagatcaaaaggaatagaaagtgttcatcaaatttaggagaaggatatagttgaatcctcaaggctgattatagttacctcctcagaaatgtctctagattagagagggttttcattcaactacttgagactgacagagaagtccctctaaaacacacacacacacacacacacacacacacactcacgtacacagcctttgttttttgcccttctgggaaatagtatcttcaggtactaggagagaataccctgatactaagtacccttcctgtagaggacacatctccattatgaataaccaattttactttgtctatgtaaattggccttataaaactctcataaactcaaagctgaaaactaagctttgcccccataggaaaggaggtggctgtgtgaaattcgacctcagtgcaccttctcctcctcttgatttttttttcttgctttttctctaattctctcatttgcacattttctctctcaaccttctgttatcaccctattcactgtatttataaagccacctctacctggtctggagagttccacattcaagatcaacactatatacatttcccaaaatatgaagccaaattattgatttacttcagtaacagactggttcatagatgaggaatctaaactgtaaactatatattaaatagaaacactcccttccaatctaacttttaaaattatagtactttatttttgaggctagtggcagatgaattttctgtgttagttgaaaaggcaatattcttgctactgcaaaaccaaggtttctgcataaacatctgtttctgcagatatgatgggtttgaaccagcactaaacattataattgctatcatttactatagctgatggtgtggtgtttacatgaatcattaagaggcttgcagtaaataggtagtgagagctagtgcctatttctttgactttaatggcacataaaattaattgcttgaaaataatctttcaaaatatatatttcttgatatctataaactcctgcagagataatccaaaaaggttttgtgggctgtctcaaggatgtacattttatgaagaattacaatccgtcagctatttgggaacctctggattggcagagttctgaagaacaaatcaacgtgtataacagctgggagggatgtcccgcttcattaaatgagggagctcagttcctaggagcaggtaatgctctaaaaaagacatgagtgttcacttaaaatctatgttctatcctttgtataatttaatctctcctgtttgattaacttgacctcatatgaacctagtatcacagaaatacttagttattccaatggtgcacacaaatatattcttgacatctgaatatgcaatataaattataagactcataagtatacatccatgtatgatatctctggtaactcatgcagttcttgatttacatatgttagcatcaccaatgtccatttgcaaatcagttgtttggaaactagaatgcagttagagaggtgtacttagaatgcactcagaaagatgtttcaaagagttttgtttactaggttaatccacaaatgcctatttatctcattatatagaagaacaatgttcttagttaattctcggctaggtaatgggttaagtaggccattgagagagaactggagactagaaccaccatccctgccattgctcaaaaggctacaatgaaaggggaggtgtaagtgtctgtagcttacccctgacatgcatgcacattgagtctctgcctgatcagagcagagacttccacccaggggaaggggagagggatgatggtggcttggtgcacccggcttgttcatcaaataaaagcccatcactgcctcctatatttacagctaagttggttggttattaagttgcttaaactgccttcagcacaaaaaggcatatgatattaataatataatctacacattttttattctgttttcatcaaggtcattctgagtttcttttagtcaatgcaaactacttattgttaatatttatctgaaacagtaataatcttacatgatacagacaacacatgatttagagagcaaatttcttcctgttaaaaagtataatatatatcaaagtctttcttagtatatcaaggtctttctgtcacttctgtgcaattacaaaaggaatttcttaacattgatttgcatcttcttttgtgagatttactcagtggcagactgtgtcctagagtttcttagcacccttacaatgctggcaatattgtgttacacatgctaatatgtacatatttttatctttaaagggttcctggaacttcatccatatatgtttcatggtggaatgaactttgagatttcctttaagttcagaactgaccaattaaatggattgcttcttttcgtttataacaaagatggacctgattttcttgctgtatgtgaattaatttgattaaaattactttaaaatataggacccaactttaaaataaataaaccatgtgttggcattacacttaattggggtttctttacaaattcacatttgttcattttttttcccagtcatttttagttttgaagtcctgtgaaacattttgtattttattatcctagtaattttttaagatgacaattgtaacaattataattttaagaaaacagactagatataaggaattaagaaaattcaatttagtatcttaagatatgaaaaacactatttccctcattatcttttgatatgagttttgaaagcatatatattatatatttttcatatgacatatagataatcaagtataataatatagtgaacactcctggacctaccaccacgcctgataactgaatattatcatttttggtctatctataaagtctttcctatcttgtttccatctcctttcagatgtcataggtaatcagaattttgtatttgttattcacatgcatttttatagtttgaacacctaatgaatgcctacaaattcttgcttttgaaatttataaaattggttttatactctctctttagcactcaacattgtttctgagtcatttatgtgtccacataggtatacattttcttggctgtgtagtatttctcttctcttaccaatgatgtattggttgttcccatgttttgcttcaatgaataagactgctataaacatttttatacatttctctaaatacaatgggcaactgtaactgcttttccttgtctttaatcattagtttgataccactgttaaatacgttattaaaattttaattcttaaaagttgttttaaagaactagcatagaaacaggagaaaaatatgaacatcttacccttagattcttgatttctaggcaaatagacaaatacaagtcttggcttttaagagtctaagatacgttcatctttttttttttttttttaacattcctagcatacacaatgccaatattgctaagaagggaaatggaaatttatcccttcatagtatttattaaaatttctgcttttttaaatatttgtttgtcctcttgtgtattgttggcttctttctctgaaacgtaatgtctatgaatcttctctgaaatgtaatgtctatgaatcttcgctgaaacgtaatgtctatgaatctaaggaccttggttctcttctttatagttgtatcttcagtgcctaagccttagcaattatcatgttaatcaatattgttgaatgaatgaatgagtgaacatgtgaatgagctcatgctgtggtgaccttcactgagcatcgttgagtcatctacatgtgcatacactgtggaggatacaaagatgtttaccatttggctcctcctcttgaggaccatatgcctgagctggaggtctatatgccctactatgccatgcttccaccctccaccttcctctattcattgctttgttactgtattaaataatactgttaactttaagtaactcttactaaaaaaaaaaaattaaaaaattaaggctgggtgcagtggctcacccctataattccagcacttttagaggcctgggattataggagggtagcttgaggccagtagttcgagaccagcctgggcaatatagtgagaccctttttctatgaaaataaaaataaaaataaaaagttagccagacactgtagctagttccagctactcgggaagctgaggcaagaggattgctgaagactgggagtcgaaggctgcagtgacctgtgattgcacctctgcactccagcctgggcaagagagctctgtctcaaaacaaacaaaacaaaaaaaaatcaatacacttagataaatatatacggagtgcctattatgtgcttggctttcttttaacacttcccatgcaactgaaaggaagcagtctttcataaaacttaacattacggtctgccatatctgaggactgaggctgctcccagattacccctcaacaactctttctattatactgacttatttcaatatgcatggttatcccctggaacttgataaactcagaatgtttccattgctgaaaccttgaatctcaaaatataacctcatatccctctagctctctcagtctctctcattaagttcaccaacgcattgacaccattggctattagcccactttctagttaacttacttgctccttacctgagccactataatgtatttcttcaaccatatttctaccaataccctgatcttgtgtcttgtattgggcttcacaaaccttgatccatcagtccagccacctcgcttttcagttctagtagctagattgctaaacactataggaaaactaatacgggtatgagaacttgttttgagctctccaattcttttattaaacagtatctattgtttacaggattttctaatatattttagatgtagaaagtgaaagaaaaataatcttaggatctagaaacactataacctgaatgtcttcaggtagtctcacactctcctgataaaaacaagcatgcatattcaactttcagtctctctatcaacttgaccgtatttgagccaagccagatttcactctctaccgactcaggggaacaaatgaacaattaccatgcttacaaccaaagaaaatatgtctaccgtcatcctagattctatcccttcctctgtaagaacttgttctacagtctcccctctttgtatgttcaactgttccctctcaattggctcttttccctcaatatatggaatgattgaaatttattttccttagtgttttttcttttgtctgtgaagcctcctccactgtacttttccttaccttcatggtcaagtgcattgaaagtggttacttttgttattgccactttttcatctcacttcagtccctaaaatgactgtacattaggttcctgcccctaccacacctttctacaaaatcacttttctaaagtggtcaatgacccccacatttcctagcccaatgatttttatttcttatattttttgtcctttttctgtcattctgtttttttcttattcttccctactgattttccaaaatactagtttctcctgatttcattaagttctcttagcttctttaaggagatcattgtcacttaaaagaactattttctactacaagacccttaaaacattggtcttgctgaggacactaatcttttcccttttctctcagtctttttacactcactgaataatcttatttattttgtcatgtattttctcctttttgctgggccatccccaaactgtgtatctttatgtttgacttcctcaaaaagagtttcatctggatgttttataggcatttcaaactcaatatatttaaaatgaactcacccctcctccttgtcaacaacaacagtcagcatttctttcaaatgcttttcataacgtgatgatggcagaacaccctcctagttacccaaaaaagatgagatgtgttcttaatttctttttaattcatctaactcatttaccttttttaccaggtcctaatgagttgcttttacaaatacttctaagattgagtcttctctttcatcagcatcatcattatccttattttaatgactctcaatatgttttcacaattaaatggatttcctaatgcatttcctgaattctagtcgagattttgttttcaatgtgtacttcttatgtctggtaggctaagcttttagtgcaaggtaatactgggaagaatatgagttttggtttcagacagacaccaaacattctttccataccagaccctcctatcactgaaagtcctttaaaatctggcttctacatagctggcaagacactacctcacctcccacctccatatgtaccctttgtcttagctaagttggtgcctttctctgaacctgatgtcctcatgtcatgcatattagtccccctccttgggggaccctccatgaatcttatatagtttctaaaaccttgctttaaacctttcccaatttccagggagcaaaaagccttctctgttctctgctttcactttactcctttcttgtcttgattgttgtattgctcccacatgtttgcctctgctactagacagtatgactcttaggagcagtgtttaccttagagcagcaggtatatggcacattgtaagagactcgatatttattgaataagtggttagacaaatgaaaaattgcttacctgaggtccttcctgaagatgatgcttttatggaaaaattcataatttttatctggcatgatttaatttgttttactcgacacaattgatctcaagattttaaatatcatatggttactgatatggtttctaacaaagtaaaaatatattaggtaaaataattatcatgagacattttgaaggaaaacctatgaacttattttttactatgaaaatttgggtgaaatatgttcacattagaaaatggtacagtcatctaatagaatacacatagaagcaattatgttagttaaagatttagaataaaaccgaaatattgaatcaaaatatgtcttacatatttgaaattgagttcactagccagttaaaataagcttaatcaagcttgacatttcattttcttattgtcttgccatattttcccccaaattaaattgatatatgaagtagtattttctcattttctaaaaattcaaagagtcatagttcaaagtgttctgttctcttcagtcattcagtcacttatgcaggggtttaatcttctaactatgttgcagcaaaagtaaaccttaggtctacataacatcgcatcacatcctataatcattagtaggtatgaatttgtttgcatcaatacaacattcttcatgtcaactataagctagaaaagtgtttcctatgttcctaagcagaaacttagggtagagtgacacatttctatagagtgctttcagggaactgttttgcttttcttcaagaaattgactttctgctctctcccaaactgcccttctgcagcctttttatatacctactttcttttttaatataaaatacagatggagctgaaaagtggaatattgaccttccggttaaataccagtcttgcctttacacaagtggatctattgctggggctatcctattgtaatggaaagtggaataaagtcattattaaaaaggaaggctctttcatatcagcaagtgtgaatggactgatgaagcatgcatcggagtccggagaccagccactggtggtgaattcaccagtttatgtgggaggaatcccacaggaactgctgaactcttatcaacatttgtgtttggaacaaggtaagttccatctggaggaattcacaaatccatacagccctggtgctaacagtttttggtggttctgtgtttcaagagatagcaatagactcaggctaaaagcagcacccaacagcatctctttttctggagaaatttaaaccttaaaaactaatgaaaacactttttcaaagagttttgtgtgttacccttaacaatgtgccatcatttataatcagcatatttatttcaatatgtcctcagtaaatagtaattaatatacatattattattaatgtgacatataattatatatgtggtacataattatatatataaattactatttactgaataaatatcaaaataaatatgttgattataaataaggtaactgaggtgcttcccaaagatgatatttatatggaaaaattagtaatttatatatttatttaaatatgtaatgcaattatatgtgagatacataattatataagaaatatatgtgtgtacatacataattatatatataattatatatataatgcatataaatgtatttcctcatatgttggataatgatcattatctgtatttacagatgaaaaaataaattaagttggtatgcataactagtaaaaaatatcaatgcaattcattgccttttctttctttgacataaatgctaattgtctccatagtttttcagtagagctttcatgtggaaaaaaaatgtggggtgtatgtggttgacttccaaacatacttgtgaaaatctatatattgtagattattaataactataagagaaaggaaaagtgcattatttacaatttaggtgagaagttaactcatagacgtttgaatgtaatcagagaaataattaatttgaaaaggctaacaatatctgtgtatcatttcttgtggcagtcatggttctgagagcttacatgagaataggtgagtcaattattcataacaagtgtgttaggcattattatttatatcctcattacagatgaggaaactgaagagcagagaggaaggtaactttcccaaggtcacatggctagtaagcagatagcaagacactaagtctctcaggcagcctgttataaagtcaactctcctttttacagtcaatgctctcttttatgggcattggtcaatgctcctttgtaaagtggggaaagcatagtaacttccagcataggaccaagcaccctcccacgtgtgaaaaaggtcctttacgtatttcaaaatctacataccctgaatggttaaaattttcatgaggcaatctttgcctatttggtaagtacataaagatttaaatgcctttgaatagaaaatatatggcaagctcttaggagacttttagaagggtagtagtaaggagttaatgaataactggggtgtaagacagtaatgacattttcaaggcacttaagatgtaacagcagctaaaaatattacattcatataagagcttctccaggttttcaggtttctgaggttagaaagaacttgaaaacccttcgtatgagtgagattacttaatcctgtttgcttctgggaaaaaaaaaataaaaacaagaaacaaaaaccctgcatgtacagccttgttctttgaattacccctaaacccattactattgatggtcctaaagacgtggctaaaaccaaaattgtaagataataacagaagtttaaaacatcaccatagacccaaagggaataattttacctacacactatgactaagtctgtgatactggaagatattttattagtgagtaatattaaatttttattactgtagtatcatccatatcagtggtctcaaaacactgaaaaaatattgacgtatggtagctggaacgtagaagtcaaaattagccattatttttactattcaagatacattgacatcacctggaatggttattaaaaatacagatgttagggacccctgtcccctaagattctgactcagatgccttgagagacactgatctatataaatagctgcatgttttatacggtgatcagggagactagtcacaatacagaggtgcagcatgtatgtagtcaattgcaattaaaacaaatcatgttcatttaatgtatttctttcaacccactatcaattgtcttaaaaacgtttttccttttctctgcttcttaattagcaccttttttttttcatcagaagctctattttgtggtcatattagtgctattttttttttaatctactaacgttgcaatcttcctccgaaccagatacaagactaattttctttcttgttttgaaaatgctgggcaacataatttgctgaagatgtgccagctcagatgatgagagtttatcttcttagaatgatcaatgaggataatcacttacatctaggttgggcatgactgggtctggcatgtggtctcacaggcaatgctctgcccaaacccctccatggagagggagagagtgggggctcaaatttagcaggcctgccaagccaagcactctgcagcagtactgccttccctagaggaagggctaatgtttttctgattagtcatcttagagctctgggccgccttttaggcatttagaggcccaggggtggtggtgtggatggggatttttttggattctcacaagggtagtggagtaagaaaagaaagcatttccactcctctcgcaaacatcccctttctccttttgttgtcctcgcatctcattcaaatgttttaggtctggggagcatttctggtggtacagagttgaaagcacgggacaaccttaactgaactctttggttgccactggaaggaccctgcactagagctcagcagcttcaagagctcagcagtctccaaggccagaggccagaggaccatttccttaggaggattagtgcttacaaacttcattttataactaactctctaggcctttttcttcatctccaaaatgaagaaagatgtatctccctgggctttcccaaattgaaaatttcatcttgtgaattaatttttatgatgttttttgctaaatttttaattttttaaacattatggtaaaatatatgtaacatgaaatttaccattgtaaccatttttaaatgtacagtttagtggcattaggtacattcacattgttttgcagatatcaccaccatccctctgaagaactcttttcatcctgcaaagctaaaactatgtacccctcaaaaaataatgtagcatttcttataacagcacttgtttgccaagctgccctttcactgttctgattttgttggtagggaagttagggtacagagaattttgataatacagttatgtgccatcagaaaattactactgataaatacattaaaattcttagcttctgaattttccagccaatgatttcatattgagcttcattgctttcaattcaattcacccaacttattgagtgtctactgtgtgtttaagatagactagcagtattgatcagtcaggactaaaaaaatgtggataatagtaaaagacatttaaaaggaaataggctgcaacttaatgtgttagaaggcataataagacatcatatgaatgctgaggagaacaatatggtcattgttactattaacttattttactgttatgcatttcattatattttatttccatttcctgctgctgtgctttaatcttgaaaagagctgatcatgtgtttgaggcctttcaaactttacagtgttttgttcggagagagagagagagagagagagagaacatgcacgctacagcaatctcaaactcggtcctgtttgtcccaatttcgtgcagttttctgcgcagagtactgccagacttcactgagctgatctctgttttcacaaaatagcatgtaattcaaagccactgctattccctggctaactggatgccttttttgtttgctgtctaacaaaaaagtggtgaatactctaaattcatttcatccgcattctctgttaaacttcacagaatggtactgcgcagtgggtgttctaaggtcacctgtgcagaatgcacattccatgaaatctcatggtgttgctattgccaacagtgaaggctggcccctgtcatgctaatggggatgtaaaactggtgaccattttgtatgttcaagattatggaactctgtgaaaaatgatagagcatagtgacagctcttctgtaggctgatgtaactcgggctaaattctatacctctgaagtgatcattatgccattcatggcaatatttcaggactaatatattttgaaattatgttctctctcctggtattctacataaaatgctcagagtgtatttttccccaatgagcttactgaataatcatgctaattcaaatattattttttggcacttaaaactgacttatatagtaacttaatctttcagaattaagagacatggggctatccccctaccataatatgaagttgcctaaattttattttatgggaagaagcggaatttagaaaatgtgggcctaaggaggtaaaataaatgctttttcagtaccaaaagttaaattagaattatccattaatgtgttttccaaataacagaactatatttctttgcaacaaattagcttgttaaaaagtaggaggcataaaaggttttccaaggaagactcgaaagtctagcaattgtatctaaccaccccccttcctcaaaatgtagtgctgcagaggacaaaaatgattggtaattaatgactcaagccctttatgcgatactaatcccttactatttgctaggtttcggtggttgcatgaaggatgttaaatttacacggggtgctgtcgttaacttggcatctgtgtccagcggtgctgtcagagtcaatctggatggatgcctatcaactgacagtgctgttaactgcaggggaaatgactccatcctggtttaccagggaaaagagcagagtgtttacgagggtggtctccagccttttacaggtaatgtggaggtcctctaaattaaatgttacatgtctcttattcatccccctttccctccctgccagcccctcattaatctatatgagtattattttaatcttgctgcatcttatttccatttaagaatacctgtatcgagtgatagcctcgcatgaaggaggttcagtatatagtgattggagtcgaggacgtacaacaggagcaggtaaatacttatcttcaaatgcatatgtgcacacacacacatgcatgtatttgtgcatttatataaaaggaaggactattaccctgaagcagtaatatttttgtagtcttctgacagagcatgccttggtttgaaaatacatctgtcaatggctaaaatgcttagtagatcagtgcttttcatttaccaagaattcactaaatacttgctcagacttgatcctttcctcttaggatgcagaagtaaggaaagttcaggttgtcttaaggatgtaatagtcccacctacctaacatgtctaaggataggtaacctttacagatggtgtagatagcaagaagctgaagtcagggattaggattatccttggctgggagtggcaccttcttgactttctcacagaaagcacatttgaaacctgcaactggttggaatcaggggtgtctatgacatcattgcagatgtttgccccgttgttgactattagaatcttagaatgactctcccaagagagaaattgctgattggtttaatatattttgaattggaaaagaaccaactaggagacagtatacattagacctaatctcagacaactgacttgttttgtacttctgactggccacaaaatcttttcccaaaataccaccacaggaaggcattcagcacaaagagttttgtgaatcagtgacattctactattttgggtcaaatatttgtcaggaaactgaacacatctccagatgattgccacttatgtctcagcaaggaagtttattcagcgagtatcaatttgtctaaagacgtgtttccatcaaggtattctcttatacttaatcaacagtaggttactatcccaggcatcctttgaggaatcttcttaatctaaaatataattaaatactgagatgagcaactaagaataattttcaagactctctacctacatattttccagaagaggacaacttgacacttttccaggatgatttaaattatcacctatttataggcaagacaatgagctgaacgatctcttaaaattcttttcaacttcagagctaagagaaagctccaatataaaatactcacttgttactgacatgttctctgctcctatttcacactcttctactttattaacaaatataaagcccgctttgagtataattcagcaacattaataggcgtctggaaagcacattgcttacttagcttaatagtccccattttgagtactactgagaaagtacacaaatagagctctgaatttatagcaatgatctgaccacagccctatgccataaattcatatttacaatctgaccacaacactgagcagctacatgctcccaagggttggagaataattgcactatttaattatttttgagtcagttttgctctgtcccttatgagaagaccatctgttagactgtactgtactttgccctgtaccacatttccgaactaataaaatcagcgtcactcccattgtccctttccttgcaactcgatcttgtggcctgtgtgttttctataggtgtctgtagtgttttaactgctcagagagtggttctcccctttggtgtttcctcttatcttttatgttcactttgtttcccttaaagctgtcctactttattggtctggacagtaaagtcggagaggaggagatttgatgtggaaaaaccagagtgatcctccatcgacagggctcaggagtccatgagcagctagagcaggtctctcatccatcatcctgccacggagttccttgggctctttctttgtgtccccagtgcactcagctgtgatgaagtttttactgatcagaactgtagaaatgtctaataaatagttaaaggtaatagattttttaaattagggggctcagcttgtaagtaaggttttgcagttcttttaaacttcctcattttgtgatattattttgaaatattctgcagaacaagactttgaaaatgactttgtagaatctcaaaggcaccagctcctttaccccacccccacccccaaaaactgcaactaagaatatattccatatatcatatctggtagaactttgctttttaaaaattaattagaaaaacaattgcatttggaaaatgggtctaggcattcaagtacaacacaatcacatttgtgattttttttttggctaatacatcgaagatataaaagtgtcaaactactatgtataataacagtctaattatcttgcttcaaagggggtacatcattatattgcttgaacttgttatctgcctaccatccacctccttctttatgagtgatgtttaaacatgtctgatacattaaatgtttttggaaaacctggactagacttgaaagaatgttatgtcgatggagttttgatggttttgaaatatcgcttaaactgaatggctcaagatgtgcagtcatattaaatcaatgctgaaaagttacaactctaataaattgtatttatgctaatggttgagtctgatttactgcggccattaaaagtgaagaataggagcaatagtcttctcagaactgccattttccctattttctcttttattccttcacagctccacaaagtgtgccaactccctcaagagtccgcagcttaaatggatacagcattgaggtgacctgggatgaacctgttgtcagaggtgtaattgagaagtacattctgaaagcctatagtgaggacagcacccgtccaccccgcatgccctctgccagtgctgaatttgtcaatacaagcaacctcacaggtaaatgcaatcctttaacagagtagaccctattaacttcctttttgtttgcattttaaataaaaatcttctgcaaatgttttttagaaaaatgtattaaatatacatgtattttacctgattaaaaacaacacccatctaaagtagtggaagcctgcatctacctaggataaaaaggataattctacaatgcgcatgggctctcatggataattttattctaaggtagatattctctccatcccccaaagattacatcataggtggctatagccctttaacaccttatagacatcttttggaaatcctatgtataaatacttatttcacaaagcaaaaatttactctttgggactagccccagttcataccactattatttattgtaaaattgctgattaaacctaattatctcaaggtggaggagtcttagagccccagttagttggactggcaaatcagtgaatcgatttctcacagtgtggtgtgccatgaagaatgattataatgaaatatactcatacacaccactaacacatctcacactcaaattcatgcgtgtgtattaagagcatttttcagcttcatgaaatattaaagcacatttaaagggagagtttaatttaagcctttgataaaagggaagtaaatgtgtcaaatttgacagaaaaaaaacattttcctctatcaaaaaatcctataacgtgaaccatcagaatggacgttagaaaagccttaaatattttcccaacaaacctgttggtcaattccctcaagactttacttccttctttagacactttggaatgcacagcccaaatatactaccaacttttagcaaaagaaaaacaaattcacacccttcacttctttcctattttaccctccttatcaaagcccagcctgagtaagcccacagcttgccttttcacaggttgcatatggcagctacatgggctggaaaataccaagtagtttattgctaaaaatgctcaaccccactttcagatgagcactcagtaatgacaccaaccctactgtatttccagaatagctccttcccccattctcctcattaaatattttatatttttccaaactatacacgttacctccctttctcatcccactcagctgacagcgttctattttagattatattagacaccatagaaaaaacaatttattttataggatttctattactttcttactaccaaatgtacatattaattgcatttttctgcctgatggagttgttattaggggttggatgaatgaatgcatgctaaaacacataaaaccattttgatatacaggaggtgtgtgctatgctataattttattttcattattatttttaattttcacgctttttttcctttctgttttacaaagcttctcttatcctatcaaaaatagaaatcttcacaagtcctctggaccctgactctttctgtttcttcagagatattactgatagcttatcgtcctctcacttatatttttaacgcctctgtctgctgcagtagagtatggcccaaggaccagcattactagcttcacttgggaacttattactaatgcacattctcctgccctgcccaccccacacccgccaaatcagacactctgcagtgtggctcagcagtccttgttttaacaagcccccagatacatctgatgtatgccagcatttgagaaccactgactgggtggattcttcccagggtcattcaaactcttttatctcccattgttaaaaaccaacacactaacccaaaccaatcacaaaaatcttaattctgtccaaactcccagctattgctccctctctcctcctctcggccttcgtctagcatgaagtatctaagctcattttgtcctcacttaactggcttctgctcattactttcgtgacgagcaccaaaaactgccatgtttacataggcaaaaaacacttgacactctatgtcttcaccactcttcagcattctccacagtaactctttcatcatttctagaaatatttcttcacttctgtgacttttctgcttacctcctggttctccaggggccctgttctcagtgtcctttgctcacttcttctaaagtgtgacaaaatattgaagagtctcaggatttagaactgggccgtcttctctttctctttcatttttttctggcttgctccagaagccttattgactctcataacatcaaataccagatagatgctgctattgactcctaattgtacatcccacctagacatccaaatgcctgcatccaataggcgtttggacacaatgacatttccaactggatgtctctcaccttctacccataccaaacctcaactcttgcttctcctgcattctcatagatacctccagccacccagtcaatacaatttgagagttactctggacttttcacctccttcacacctcatatccacagttgtcattctatttttcaaaatatgtgttaaggtcatccatttctcctctaatctactggccagcccaaactactaccatctttttcctggacaactgcaatacttaccttcatctttttcatagccttttttttttttttctctccctggccgtgagtgtattctacagagcatccaacatcatgtccctctcctcaaaaactttctttcttttttttttaattatactttaagttctgggatacatgtgcagaatgtgcaggcttgttacataggtatacatgtgccagggtggcttgctgcccccatcaacccggcatctacattaggtatttctcctaatgctatctctcccctacacacaccctccaccgctcgacaggccccgatatgtgatgttcccctccctatgtccatgtgttctcattgttcaattcccacttatgagtgagaactcgcagtgtttggttttctgttcctgtgttagtttgctgagaatgatggcttctagcttcatccatgttcctgcacttcctctctcacaatcacactttgtctgggtctccccctacttccagggtttccaacaattaccgttgtaattaatataatttaaagaaatttgtatgtaaatccttaggagaattcctgacaatgatgatataataaatccctagcagtggaataactgcatcgaaggcttttaagacattgtatagtcttgaactttgaagtcagacattgatataaatctctgctatataccttccctgtggataagttccacatccttctggatcctaaagtcctaacctatgaaatgggagagtgatatttacctcagaagaatattgaaaatattaagtgatatgatattctagctctaaccctttttagctgtgtagcttggacaaatcaataaacctctgtttgctttaaaatccttctaggtaaataagaatgagatacaactacatgcctcccagggcagctgtggggattaaacgaattcatatgtatgtaaagcacatagcacagtgcttgacatgtggcatgcactgtatcaaagttacctacaggatatctgtaaagtgtgtaacattatgcttaatgcttggtaatttctcaagaaatggatagcaattattattattattattactattattatttaatgaagtctcactctgtcgcccaggctgtagtgcagtggcgcaatctctgctcactgcaagctccgcctcccaggtttacgccattctcttgcctcagcctccccagtagctgggactacagacctccacgcccgggtaattttttttgtatttttagtggagacagggtttcaccatgttagccaggatggtctcgatttcctgacctcgtgattcacccaccttggcctcccaaagtgctgggattacaggcgtgagccacagtgcccggccaggatagcaatttttacactgcccaaaaagctgtacaaattatgcttccaccagcaagcagaatgcaagattgtgcatttcattttatctagccaacaccaaggtttacacttgaaaaaaattgcaaatttaaaaggcaaaatatatcagaatattgttttagtttgtatttatgtgattactagagagattagttttttaatatttattgaccatttctacttcttttatgatgtgcctaggtaggtccattgttttttattttttattttattttatttttttattttttgagacagggtctcactctgtcacccaggttggagtgcagtggtgcaatctcagctcactgcaaactctgcctcctgagttcaagagattttcctgccttggcctcccaagtagctgggatttcaggtgtgcatcaccacgccagggtaacttttgtatttttagtagagatggagtttcaccatgttggccaggctggtctcgaactcctgacctcaggtgatccaccagccttggcctcccaaagttctgggattacaggcatgagccactgcacccagctgcattgctaatttttctattgaatgattcacattttctcattaaagtttttctctgcatatgaagaataatatacatgtttatctcatctaatgcaactcccccagttttgtcattttttaaaaaattttgatttgcatttttgtgtagagatttaaaaaatattttatgtagttaatataacacccttaaaatgttcaatattctatgtgtgattttttaaaaatatatattccccatttagggttgattattgtttatgttagatataccatattgataacatataatgcatattcctcaaaatagtaattctaaggttaggataagaacaaatcagaaactggatgcagggaggcttttcaaattaaatcagcctctcccaagattctgaaggataccttcttgaaggcgagatcccacagattgtaaaccaatgtagggcagtactggatgttactcaaaaggcatgtcatacatggtagtgatgtatagggagaagaaaatcagaaaactgttgagcaattgttatttatttttatatatcaaatttgtcacaaactaagggaagagttaactatgttaactatgcatgcagttttgtcaatttctctgagatttttttgtttgaattttttgagtttttattacttttacacttattatttatgttttaaccttcaaagtctcattgctttaggtacagtcatgcattgctaaaggatggatatgttctgagaaatgtgtcattaggagatttcatcaccttgcaatgtgcttacataaacctagatgacatagcctactccacacctaggctagatggtgtagcctattgttcctgggctgcaaacctgcacagcatgttactctattgaatagtgtagggaactataactcaatggtaagtatttgtgtatctaaacagatcaaaacacagaaaaggtatagtaaaaacactgcatggtaatcttatgggaccaccatcctatatgttgtctgttgttgaccaaaacattatgtagcacatgaccacatggcagcaacttggctaacatcctttaattcaacattgttttcttataagtttgatgagaaaattaaaaaaaaaaaaacaatccctagcaagggccactctctgcatggaattttcacattttccccatgtttttgtgggttttctctgggtactccagtttcctctcacatcccaaaggttttccccttacatgaattgagttgtctacgtgaccccagagtgagtgagtgcaggtgtgtatgagtatgccctgtgatggtatggtggcctgtccagggctgattcctaccttgagccctgagctgccaggatgggctccagccacccacaaccctaaagtggaataagcagattggaaaataaatgaatgagtaaatagaaatcattataaaataaaaattcataaagtctatgataatcatacagatgcacagcaataaacaattcagtatgacagggctcagcaagctgcccagtctgtgattgctggggtttgaacttcatgctggtaggcggtgctccttacaatgttcacttggaaagcatttattccttgatttatataccacaccactgtcactcactgattcaccaaaacttgagtaaatcattatttcgttttgattaatcttttgtaaatgcatgtatagcacacattcatttcaatgtttaatattagtagtctatagaaatttggtgatgttttgtgaccagaaatatgccataggatcttaattcttttttacatcaattagcctgtgggaaaattgggtttgttgtatatcatttcacttaaaagtgatagtttacaaaaaattccaatgacattaagtgaagacttctatatatctctgcagttttagttttatctttcacttgagattctctgtatttaagtacgggagtcactcattcatacttgtttttataattgatataattggtcttctctctgccatcatgttttatgctttccagttttattatttcttgttttttagtgattttttcactacatttcttgccaatgtgtactatgaattctttgattttttttctttcaaggagtttgcttctctcaatgctaaattgagtcatcaaggacataggtagaaggtaatcttaaagactaagaagaactccagtattgccaggtggacttttcattgtgaagactcaggataatgaggagggaatgtgaattgagagtcaccaaagccagcttggataattatcaaagtcagagaatttcccagtaaacaaaaggaatactaggaagtgagatggaaggagctgataaagcagagagccagaaagctggatttggtggagacgttaggggtgcagagattgttttgaggcagctgttttgccagttggttgagaaaccaaggtaccaaaagagagaaaaatcggtgaagcctatataaacagttttgctattgagcagttttgctactgatcttgaaaataacccttatttagcatttctgaggtgacttttgttgagattttaatatttaagttaattttggttgttagagtcatatttaaataaaataattctgacactgaatgtacaaggcaatttcgctttattagttagcgtagggttctttaccaattaagtttaaaaaatgctaatcagaaaatgtgctgttttatttcattaattttttgttgtataataagctcttttattcttcagatttgggtctttcttcagcttggaaaatttgccattgtgtttatgatcattacttctggtgagaaatagcaattttcaatattgtatatttcttcctaggttgtcttcctcattttagtagttcagaacacggcttgtagagtcaaatcaatctaaggtcaaattccgcctatgccactttttagctgtgtgatctcagacaaatttaaaaacatatccttacattggagtttcctcattcataaattggggatgaaaaccttatttatattatggaactgctataaagattaaaatgagttatgtaaaatattttgctcagaaacaggcacatagtgagtgttcaatgaattcatagttacctttataatctctgaattacagtttctgatttctgggttattgtcccataattgtttttatttccattttctgatttttgcactgttgattctgctctttgaaacttctaagatgatttttaattcttctagttcagtctttgatatgatctgcctttttcctcatctagcttgctttgatttctgcctgcctcttgaaattctcaatttttgtcttcatctcttgtttactgcttaccttctgtctcttacttagtggattccaagttattttagatctaattaatggcatgcaactcgtgatttttaaattttacaagtttcttgaattaaatcctccccagaatatgacaatcttccataatttgagggctatatccttatccttctttcaagttacaatttttccatcagctaaatgtcctcccccaaactcaactccatagtttagttggctcatctctaatataaccttctgactgggtgtttgcatgggaaaattaaactgttttcaaatcatcttactgggcatccagttgctgttaataaaagcctttgctaagatgatgacagggttagtggggtaagtttgcattagccgcgcagccaccctacagtttcagcttctttcttcccagtgtttggtagagtaggagtgctgagagcttgctggcattttgcttccagtttaagtttgggtttgcctaggactttccttctaacagtccattgtctctgcctggtctcgttttaggtatttataaaactttggtcgtttcactgggattcttacaaggtggtagttcaaaactatagctgtatactgagtcaactggggagctttaaaaaatatactgatggctgtgtgccccacatgcaaaatgtctgattaaattggcctggaatgtggcctggacatttgtacttttaaattatctcaggtaattctgctgtacagccagcacagggaaactctatttaaaggaggagtttgtcaccagtgatcacatttaaattttatccagatattcttataactttcatttccccactgaaactcaaaaatgttaggaaataaaaaactaaatgtatataaaaaataataagctattaaaagtaaatagaaaatactagcaaaggaatatcataagatgacaaaaattaagtgtaatagttattgggaagtgggattttatgttcagacttacaaaaagcagaaggtaaaagcaaagaaaattattaaaaatgaatatcaactaagataactgaagaaaacagaatagtgaagcagaatatttaccattcatgaatttgtctatcagaggattaaatgagataaatcccagttgcaatggagagtccaagggttaacaggcccgctcaggagcaaatgggcccctttgggccacagggtctagattctgtgccctcccaaggccaaggttcagagcaaggagttctttaaggttcattccctcagccagagcctcagggtagaaaacccttcagttatcactcctgtgtatctttagatttgttgaaagggctccaattaactctgggtagcttttgctgatttttcctgcagccctgttaacatgcaaagctgcagcccagagagacaggactggcgtttcccctcaaactgaggactgctcagaaactgacttcataatttgatttgaaattatttcaagaatgaatggattcaagacttcgcacatatacgaattattttttccgtaaggtgtttaaacatgtaaacttaattatcagcataattactacagcacctggcatcaagtgttacagatataattggtgtatacaaaatattttctcaattttattgttgcattacattgagctaaagtctaggggttatattgcttcttcaggtaaaatgataaataatagtaatatttcttactatttgctatagtttggcaaatgaatcaataatgataagaataatcttccagatgactcacatatatctacatttatgtaaagaaaaagacattttaatttataacacaaataataatatagcttttgccactaaaattgtttcagtctttacatacaatggacttaatttttttacctgaatgaagtgggtttcatactgaaaatctgcctctaatttttgcctcttttacatggctactgtaataattagtgactctcaattctactggtcataaggtgattctcagattacttataaaatgcagatttgggggtcactcacacatgattctgtacatctgggctagtatttagcaatttgcattttacctaatgctccaattgtatttttggaaggtttatgaaccacatattgaaagacactagtgtagaggagtggtcagcttagactggaatactttcacctgctaggcttgcaactatccctgctttattcctgcttctggttctgactgtgttagctttgctgccagaaaaatgccaaggcaagtgaagaaagagaggcagtgtcagtaggacccctgaaccccagtaggactcctgaacttctgaaaattcccagaagaaagaaagtaagaattggggatcttgataacatggattctgattcactaggtctgggaatatggtgttagattctgcatttccaaccagccccctcccactctgtcatgccccatatagaaaggcaaggagctcactatttatatgggaaatggaaaacaacaacaacaacaacaaagaaaaaacagtaaaataaaacaaaacccaattctcaattacaagatgccccttaggttcatataaaagtgagagcagtataattcaatgtaggaattatcattgcaatgtcttggtagagccttgcctgcatgcatttaagttacaaacattcaactacatattttggaaatgggtaagggatggaggaaaaagtaaaaaagcaaaaattaaacaaaacaaaaacctataaaaatagtgtcataggcaaaggatgctatccagtatggaaaatgtcaacatctgttagctggaaagaatgtttgaataattttagggtttcccagtcattgacaaagaagtgatactcattgtttgggtgtctacaaaaagaatgaagacttcagagccctgaagaatcattgatttctgaagagttagaggcatacacaaaaccaaatgtactatactttatgggccatataaagagttgtcaagggaactttaaatcacgttatttttgccttatgcctgattttggaacttaaactcagctatgcagagtatcatcagtaagattaaattaaattaaaatgctactctatatatgtatgtatatgtgtatgttatgtacgttcatatattatataaatatgctctctctctatatatgtattctctctatatatatgtaaccatacttacctgagaagtctgcagagaaatgactgtaattcaacgccgtgaaatttttttttctattcaactgaaagttcttactccatagttgctaaaactgcctatggtactctctgtgcacccatgctatttcttcaatagacaataagctcctggaggacaagtttcatgtttcatatttattttaagcctcgttcactaccttgctcaaggtaagtgattaatatacttatcttaaaagaatgaatgaaggaatctttcaattagcaaatgtagctttctgctactaaccccatagttaacctaatgttaatatttttttgtgctgagttggactgagtattgaactactagtccttactaaagtctcctcagtcttttatcaacagttctttaattttatagaagaatgcacagagctatcacaacttaaatgtatatttggaacttaatacacatttcccaatagaaaaaaaatatgttggtagggtaagactaataaataactaataaagactaattccaaaacttagacctcagaatagaacccaaccactacatatttgaaatgaaaaataatggaagccaatactgctgcaatgctgataattataaagaacagaaaatattcatttatttaaaaaagtgatctaccacgttccatgctagtgctaggccctatcattgtaacatgatttttataacactaaaatatagcccaagcactctctctgaagtataagattatgtagacaatgaaagttttatagggaaaacctaacagagatgggtttatcatttttaattcattatttcacttgagatactgagaacctaaaataatagcgatgaagtttttctctcactggtaataggtgtccacagtaagtcaatgcagaggcgggatgttcataggcgagacccacacacttcatctttttgctgtgtcatccttatggacaaggcttctacctcatagttcaagatgactgcttgagctcctgccatccagtctgattttcacccaacaggaagaaataatggttaaagaatactcacattcactttaaagacatattttagaagttgttcctccacctctggttatcttgcgtggccagaacttagtcacatggctgtacctagcttcagggaatgttgaaaaatgctgtctttattccaagtagccacttgcccaggtaaaaagtgtttttattttactgaggaaaaggagtataatacataataaggagcaattagtaatctttgccacaataggaaatcgtcagaagtaaataaaaagtaattctttttgttggtgttattaaagataaaagccagtttttatagtagaccataaattaatattccaatatttgtagtttattacgaacttttttttttaatttgagatggaatcttgctctgttgccgaggctggagtgcattggcaccatctcagctcactgcaacctgcgccgcccgggttcaagcaattctcctgtctcagcttcccaagtagctgggactacaggtgcatgccaacacatctgttttttgttttttgttttttttgtttttgtttttgttgttggtatttttagtagagatgggatttcactatattggtcaggctgatctcaaactcctgacctcaggtgatccacctgcttcagcctcccaaagtgctggcattacaggctacaaaatatttctttaaatgtaaatcttgaaagaaactggtctgaaaaaattcacaggacgaaaatatggcctatgacataaatagtaaaaatagaaatgatgtaatgttcctgcttagctaatgtagaaagatttcattaggtaatgcagtgttgatgagttaatagctttgtctaactctcctgaatacataatgtgcctgaactactggtacattgtgaaatcttcagagagagttgttttttaaaaaaaaaagtttttcattttattttatgcaataagaattgacaccaaaggatttgcatttctttttggtaacatgttgagccgtagttaaaaatgatgaaaatatataacttttgttctacagtgataatcaactaggcatgtccacaatgcttataaacattcaatacaaatacttcaaggttatcaatcatagttgataaagaagaagaatgcacagccagacttttctgttttctaccttttatgatcattttatatttgtgttatatttggaacaaattaaaagggttatatgtataataaacaaaggtccaatattgaacccaatctctctctctcacacacacacacacacacacaaatgcacacatagaatttcttataaatcagtcatttttgtaaaggaatattacaggcatacaaacttgctcattttggaggacaagacttctaatttctgtttgtaagcaataggtgtcagtaataaatttgaacctcttaacacattttaaggtgcattttaaataagatattttatagtaaaaagtgtgctattattgtttttaattaccatttttcaacacttttttcttgtttgtggaactggagcttaggtcaaatgggaggagtaatgatcttggggtcagaatacaggttctaatattggctctactgctttttagctgtctggacttgagcaccatacagtacactcactccaaaagcagcctcctctgtacaatggaataacaatatcagaggcttgtagcaggggaccttggacactgatcataagggatgactttcatttctctttcttttcttttcctcttgtctccttgcctgtctctctgcttagtcaggtccagtgttttcttgaagagtttcagtaatttcagtgtgagacctttatgtaaggtaaagagttaacacaagcacgtggcttcaaacttattggcaaattagaataaaaatggcaaagactctgtagttcttaccacaaaggcattgattaaaaatttgaggttagaggtaaacctgctgagagaatcttaactggataatactttgaggtcaattaaaatcactgtttaaaccgtcctctaagactgggattagaccacatattttataaagaaataaagaataatgtttttcctgtttgtaagaatcaacatctgcatagtctttgataggtatatgatattctatgctctctaccaaaagttttaaacaaggtcaaaaaacccatttgaaggaaattaaatgtaagaaaaattagttttgaagtttccaagggattaccttaggtttgggttaagtgtatttattgttccaccttttgggtaaaatgcaaattgactttccctttgtaaatattagaagtccttatttttattgaaaatattatccaaaaacaacaataacaaatcccaccctcctgggctaagaaccagaggagaagcatcctggatatgtttccagatctctattagatagttaagttttcatccatatttaacaaatgtcattattcagtttcatgggatcactgtgtcaaaatgtctgtgttagaactttattttcagaggttcctttaagtggtcaggaagcatggcatattggattgattactctctttaatccatccactgggttggtttgggatgtatacttaaaaattagattttatcagcactgcagcgggatcctcagccagaagtctcttcttctgccctccttcccctagccagttttcttttaaaaagtgggctcttccattatgtctccaggtagcagtagcagctctgcctgtgtggcatcccttaccagatggccctcttaataaatgtcttgctcttgcccaccctcactttcttgatccaaatgtgaaatgccagcaaataaataagagcattgtactctgatgagttctcttgagatgggggaaaaccctggggagaggaagctagaaacagcttttctgtttgctgtgactgctcctaattactggccagtagtagaagatatcatttagatgcagtagaatataaagataaagaaaaaaaaatgagagataaattctccatgttatcccaaatgcctttgctaacgtggaaatactcttggattgttggagtgcatttgaaatattgtgcatgatccttacaaggggacccctgactttggactcagggtagacagttgctgcatgcagatttcaccgccagactaaaagtgcaacggaaatgagtgggtgatgagagcagagcagccagttctttaattgaattaaaagctgggtgacatcaatgcagacacctgtccaattacagacaggccaaggtgtttaccattgctgtacaagcgattcgaagatgacagaaatctttccgcccacagattaacataatgaaggagaacagattacagtggatgccggccaaacaccttggttggcagctgggggtggggtgggggagggaggaggagtctgctgaagtatgtaagtagaaacggagtccttttttcttctctgaaatatgctcggctttaaaaaggatccattttgctttgtgtcttaggctcggtttccaggcagagcatttatacttgtctgcatttagtcagaggagttaatcataaaatttcaacgtgaaagcagactcctctgttgttttgctgcttctcagcatacggtgtcccattagaggtgcaaaagcttgcagagctggtgtcagctccacaatgattttgtcttaggtcgtcaggctgcctccaattattaatatttttctttggctcctttgaaacttgaggttacagcaaaggaaagagagtgttggagataataatgtatcagtcaaaagaaacaatgtctgtcactttgcttgttccctggaaggggcgtggtgggagtcaggctctcctatagtgagagaaatagccgagtggagctaacagtctgcaaaatcttaattttcagtcacccgtcaagtgctaacttttggtaaaccatactaatagctgctgggatagaggataaggaaagcagtaaaaggctatgccctctgtgttcaaggaattcccaaatcactgtgaaggacttctaagttgcaagttctctaggccaatgctcttcccctctgttaagtggaaaccctgagtgcacagagtttggagccatatgcagtaggcctcttaacctatctacggtgatgagtttccttcccttaaatcaagtccctgccccctgatctttcagcttgggctttctgcacccactgtggcccacaggacttcaattcaaagggaatctacttacttgacttcaaactcccttggtgtggcatgtcaggatttctcaatgttaggcattaatgcaaaatgcattatcgcttagcagtgagagttatggtcctgctggtgccaatgattttaatccggatacccacgctcctgtgtttcatgggatactaacacttttaagacatcaataatgcttactttatgcttattgaatgtttcttcagcttgccctcttccattacctagagggactagcaggtttcctgacatgattgggaccattttctgatttcacagagtttgtggctgaaaggcagtttgcgaggtcatctggcctgccttgtaatagggacactctcaaaaaaaaaaaaaaaaaaaagacttctctgggatgtgtcccaaacaaagagattcacaaccaaaccaattttaaagttctccctttcaggatatacttcttcagtataaaaaccccaagtgtcacaagtatcataaaaggcaactaccgcattttctatttttgggctttctgtctaggattcctttagatatgtcaattctctatttcccagtattctttttaatataataccaaaatatatatttaaattaaatttaggcttcctattatcttgaactggtaagtctgaatcttataaatgtcattgtctacttggcccgtatgcaaacattcttctttatgtatcaatctgttactgtaagaattcttctagttccaatattttcttatgttagaaaccttgtaaaaatcagttgtattctatagcaccttttccagacgcatatagcggaaacattgataaatgctttttgatgatgatatatcttcagagtaacactgtattttccagagagtacctaatctaagtagaaccctgacacttaaagcaaagccattaggataaccactcaatgatctcaaaggatatatccacaatctacatagtcttggagagaatgtgttactctctttctttggccatggcacaacttttcaacttgaatccatcctggtgaacactacttactgagaatcaaaggagataaaccacgtgtctccaacaataaaatgaccttgtcttgattccaagtgaatgaagaccacatatttgaccagccccttgcccttgcataacccttaatttttaacctgacaggaggagaaagcacagtgaaccattatagtgttcttcttcctgaagtaggtaattctaactgcctttaaggaaaattatcagttggtttgacaaactttgtctctgacacacagcatgatgaacaagattccctactggaaatagaaaagaaatggcactccagccttagaaaatgcagcacattttttgaaagtgtgatttacaagccatctaaaaccttccatctttgatccaaagttggcaagaaccaaaacatcagctttcttctttttctttctttttttttttttttcctttgttttctatttttcagctctcatttctcagggcttattattgtttcaccgggcttgaaatgggaaatgtgagcactttgataaatggcttgaaagatgatctagtttctctccagcatctttctttaagagtctcagggtttttctatgaaatacaatacaatttggtaaagatctctaccaaatcaaagctgaagaagcaagtttgctgagatgagcagtgcttgcttttaaggtccttaaaataaggagtggctaaaattaataaaagactctcactatacacatgttatacacaacgtaactcctttagtgaagacaagaaacattaaataaaacactaaagatcacttagtgagttgtgaactcaggatctggtttgatacaatccctctgaaagtctatagaatacccttccttataacttgatgtaacaattaaaatttcaacatttcactctagttatgatttggaaagaaatgtcttagtataaggaattttataaagccaggctgtaaaattgtacaatcatagagctgcttttatatttctcaatgataatacttcctgaatgtacaacacatcttcatgctaatgattgcagataaccaacctgtatatcagcattgtttctttttgggcatggtgttcctatgcctcagctgaagcatgctcatctatgaagggtgctgcttttcacatatgccccataggttaagtgatgataaagggaaactagcctcatattccaacatgcttttccttattgacattaggattaaaagtcttattctctgggggctgattcatttcttgttagcatggcgttatactaattcagccatgcaagtcatcttatttagaatcttacggtagtttccaacttggcaataggaaagacatggcaaatgccaaagatttgctaaagatagaatggctaaaacacattttatgatgataactttagttttgagcctggaatttgggtatcgtggtggaggcattacaaaatggaaaaatgaagcttacataattatttagaatgttgattcttggttggggcacgttgagtatgaaataccagtgggacatccaggtgtggttacatggcctgcagatagaaacccagaaccagggcttgggagagatgtgaagtctgtagatacaaatgtgatcactgaaagataaggcttaataagctagcaaaggcgagtgtttagaaaaagaaagaagcttgacaacaacccaatcttgagaaacaaaagctatttaagagactgtgagaggaacatgagtcagtaaaggaaacaaaggagttctcggtagtttaggagaacaactaaaaagttcaatgtcacagaaggaagttgagggaggataaggactgaggaagggctatttgatttggtatttaagggatcactgctgatctttaaaagatacaaagcgtcggccggccgggcacagtggctcacgcctgtaatcccagcactttgggaggccgaggcgggtggatcacgaggtcaggagatcgagaccatcctggctaacacggtgaaaccccatctctactaaaaatacaaaaaaattagccgggcgtggtggcgggcgcctgtagtcccagctactgtggaggctgaggcaggagaatggctccaacccgggaggcagagcttgcagtgagccgagatcgcaccacagcactccagcctgggcaactgagcgagactctgtctcaaaaaaaaaaaaaaaaaagaaagaaagaaagaaagaaagaaagaaagaaagaaagaaagaaaaagatacaaattgtctagtagcatgtagaggcagaaactgagttgcaatggtagcctaaattggaatggcatagctctgcactagagctcttgactggcaatactccatgtaagtattctaaagtcctgaacttgttcagtcttaatactaaccctttgaggtaagtactatattatccccatctcacatgtgaggcctgcaaggcctttccttcaagaccgagattattattatctgtttacagactaggaaactaaggcacagaagtctgaacaacttgcccatgtacatatggccaatcggcagcagatttggcatttggagccagcaatctggcttgagcatgggtgcccatttccccactactccattatgaagatgtgcatgtgataatgttagcttgcttttaagccatttggtggaaggagaaataacttcttaaaagaaagtaaactcagaacgtaggtcatgatctgggagatttaacaggaaatgacaatcgcaggggcaggaatgagagaaagcaggaggttctgacacgagagggttttgaaattagagagagctgaatttggcatgagatggtcacacatgtgtgtatattagttcgttggcttgctgtcttctttggccatgagctaagatgacggtgccaagtggatgaatattttcatgtagaagcatggcagacaggattcagtagcccacggagatgcctgggtcgttgctggaatgaagacttagagacagccctaggaactaagggcaagtgggaggtgtcaaagcaaagaactggtctttgctccatcctggcttgttgatcttttaattctttaaattttctactggggagggaaattatggaaacatgtatattaaaatttgtgtttgaatgatgaaagctgtcatcaaaattggcaccttaaagcaataatgtattctctgagcgattgaaggtttcatcaataaagagacaccacgagtggggccatctttttataaaaatagtcataatctatgtggttaggattaaagattgctctgaaaaacgtctttgcggaaaaacagtggtgagcaaaagcacaagttatattttggattttttttaattcacaggattaactaaataaggagtctctgccttgcttatgaacactagtaaacaaaatgtgttttcatttctacacatacttttaattgctgaacaaatctcatatatctaccagcaagccatgttaattcaatacttccacgtgtaacacttccgtttaagacaggtgtcttaattaaataaactaataattttgcaagtagaagtacaaaagcataattatctaatttgctaattgttcaactatgttaatttgcatacttgttagctacaacataaacaaatggtttgtatatgtatcgcctactgttaaaataatgaagccactcttgggagtagcatttttaaagtgtgttaataggtgccctataaaaaggactccttagttaaatacggttgaaaaatgctaggttaaagaaaattaaatagttttgtttctgcaggaggtctaggatcctggaatgagataatatatatcttagctattggaaacattgtgctctgcctcacgaactatatgtggaaccccctccccattttaatgggagaaacatcagatgctgtttgagagctgttttaacaataagttggtctcacaattttttctcatgagtccttccattcaacaatcagcagaaagggaggaaaatgactgaaagaggaatatgtttttgatttctgtctctggtctctttgtttttgtctctctctcttatagacacacacacagatatacacacaatgctctttattgatgcttatggtaaacacgcaaccctcttttgtccctttttattataggcatattgacaggcttgctacccttcaaaaactatgcagtaaccctaactgcttgcactttggctggctgtactgagagctcacatgcattgaacatctctactccacaagaaggtaaagtaatttcaaaggtcttgacttccacatttcagtcatgaataataaaataggagaagagctaaatgctacaaggccatttgctggcaaaccccaacctaatttgatgacaaagtgcattgccaggccataattgctccattttttgggggggtgcgaaaatgaatcaaactccataccctttaatgacatgcatctttaatagctgtaatgcagattaatgggctttttaattgctgttacattgttcatgcaagagccttgtcattaatatgaagcatctgaaagattaatgaaagcttcctcattttactatggctcagaagtaaatctagagacagtctgactaaaaagaattgattgtatggcacagtatgaaattgagaatcaaacggttgatttccatggtcttttttaactgctaaacagcagcacaggcaacaattatttcagtatgatgaaacctccaaatgccaattgaggcattattaatcactgcttagttccttccaacttaagtctcacttctgttgtacttggaacttacaaactgttggcataaattaaggtttcagaaagcatatgttaagaaggcagtgagaaagagaaaatattttagcacgccaaagtgaaagctttgctcaagcatcagaatgcatcacttcaagaaataacagctctcaaaacatttgaagcattgttacttcatatttctctattctggataagaggaattgtacatatcttatactgtctagttgaaaagttctttaggagatttaaacgcttgatctttagggaaaaagagtcagccagtctttctctctctctctttcccagtatctatatattccccccttcctcttttaaaccctttaccaagcaccacttgcactgaagatatgtaacagaaaggaagacatggacccataggatgaaaccaggacaggataaatgactttgtaaaatccttcttgtgacccttaatatgctgtattttttacctaaaccaatcagactcccctcacctgaactatgctgtcagtgacccagcctcagcattttctccatctggtctactggtaatagcactgtttttgttgtatcattgcatctgctgaggacatgattatcatcccctcttacaaggactttgaccagcctcaatatgggacaaatggccctatgttgcattattttctccgtatccactaaatcctttgtccagggtttacctggtacccttcataccaatttcaagctaagccccagagagatccctgctcttgtttatatttccttttttatttttaaagacattcccaaacttctaaatatccacgaagtaattctgaatttactaaatgatagaggagtttaggaaaatttaaaaaaaatgtttagttcttaggaccccccaattcattgacaactatataaaatacacagctctttttaaaaaaatatgcactaaagttttcatatgtaattgactaatttggttatgcgagctctggcaattcttatcattacatataggtttttaaaaatttatattatgaaccacattcaccagcattactcatctcagatcacaagctccttgaggctaggggactctatctgcttaatttgctttaataggtacagtcccacatagagattatgggttaatagtacttttggtggagtaacacaagcatcagtcaagtgaactagtgtaagtactcctcatccatcattgacacaaattctcataaatgtgggacagttatttaacactgttcctaaagcaattactgacaagctgcccacgaatcgggaatatttccatgcatgggatttcaggtttattccatgatttattggtttgggtctgaaaagtttgaattagaaaagtaaactaaaattagactctataaatcttttcttccacagccccacaagaggttcagccaccagtagccaaatcccttcccagttctttgctgctctcctggaacccacccaaaaaggcaaatggtattataactcagtactgtttatacatggatgggaggctgatctattcaggcagtgaggagaactacatagtcacaggtaagacctctagagttatcagcgaattgttatagtctatattcaaatataaacatacatatagttggctctcgatatccaggggttccatatctgcaaatttaatcaagaatgcttaggaaatatgtgaaaaaaataacaacagaacaattaaaaataatataaattctaaaaacatagtataacaactatttacatagcatttacattgtattaggtattctaaggaatctagagatgatttaaagcatacaggaggatgtggatagcctatatgcaaataatacaccacattgtaacagggacttgagcatccatgaattttggtatcagtagagggtcctggaaccaatctctcactgatattgaggagtgactgcacacacacacacacacacacacacacacacacacacacacacaccagataaatagagtctatagttatctgaaaatgtgtttttgaaattgggttgcttatttttatctcctgttaatcactccaattgtatgatcttgaaggtcatattagattcatggtgaaactgaagctaaaaaaatatggaaaagtgctcatgttacctccctccacccagggctgtcctactgtgtgttctcttctatagagcccaccaccccttacctaaatccttctagcaattacctttgctcagatgcagaggaggcctggaaatgcacaaatgtgctaagcacaaagagctcagcacatgacttctctgacttcagcagaccacaaggattgaaattgggagccagtgttttcccagtcaggctcacagtgtccagttggatcaatgacatcatcaaataaatgcctctctcacatgagctattagagtggtgcaaaagtagttgtggtttttgccattgacagtaattacttctgtaccacacgaatactttaaaatcctcactaatgtgtaatagtcttaagactcagaagtgtgactcagtgtggtttgaattttagatcttagaggaaacatagtatatctgcccatatcatattataaagtgtgatgatactgaaattaaatgaagtaaattcttgaaaaactttctaaatacagaagacttgcattatgtatgctgcctgtactgtgtttatatttgtattatacttatagtggttttgtatttcatattattttatatactgtatgtgactctcatgtgagacattattaatcaaatgttgactgatgaaaaaaccaaggcctagagatattaacttcttcataaaggtcataacaagttagagtcagaggtaggatgaattatttatgtattcactcactcacattaatgccaggtactaaggttgtaatagggaactggccagatactgtccctcttctcttggtgctcacagcttcatgggggcacatgtagatgctggagcaagtcgtgtggacagggctgtgtattcatccagttgcattctcaggtttacatttttttggcccccctctagtctgagaaccttaaaaggacaagaacaattacttttatattttattattcataattggatagaattccataatatttattctacaacataggtattattttacaccccaattttacaagtgaagaaactgagggaaagaaggattaagtaacccaaggtcacacagcttgagtcggaggctttggtactaacccaagcattccggctgtgttgaagaatgtggtcttaaaaacaagtgttttaacttgtcttagtttctgaatttgtaaaatggtgttaattacattttccagtattttaaagagaattagaactatatataaaatataacatgtcattagcaattggtaaagagaagttataattgttatctcctgtacaacacagagttcattgtaaaaactgaataggttaatcttactccaacagtatcttatggcatgattttaactaaaaattataaaccacagaagttatttcagaaaaaattaaatcacaccatggaaggaactttacatatattacatctttgaacctttacatatattacatttttacatatattacatctttgatgtaacatattaataattaacatacaaagcacttctgtgaccaagaggtaacattgcatgtaatgggatatcataacttttagaaccagaatagacatgtcctctgagaatccttttgctccccacgtgtgacacaggtatgccccgtatgcttactgattacctttatattacatcgctgctttttgtttgtgtcatcttgaataggactgtttgtttgttcatcggtttgccctgctgaaccataatgatcattaaggacacaactatatttgtttttttcattactgcatctcttggacctatcacagagtgggaatggaataaaaagtgttagagtgaaagaatgaagtcagatgattcctgggaataaaaacaagaagatagcaaaggggaactgatggaggataggattagggtaggaataaggcaatagagaagagagaaaaatggaaaagatacagccaggggaagagaaactaagaccccttccatgcgcctaaacgaaagctgcatcagtccacagggaagtggtgcagctaatggcaggtctcaaactgtgggccttgactctttccaaaatgtacagaactccatatgaggttacactggacaaaaccggaaaaagggcagtgtagggagaggaggaagaattcacatcaatttctaataccacctgcaaaatgacactgaattctgtattttgtttgtttgaattatcaagaacgccatgtgactataggccctgaagaaagattgtggtaaatggcaccatagtgtattattacaatagaagccccaaatataaagaaagtgaaatatttttaaagtgcctacatccatggtaatagattgattcttcaatggttttctatctttatgtaatattttaaagaatatatctccaatactacccatagcatttttttttctgctgtagctttcttggcatttcataagcaactatgttccttgttgctttcatctccaaatagtttaagatatgaagcatattgggactgcaatgctggtcaaggaggggaaataaactgagaaagttaatatggggttcaaagatgcacatgattattctaactttatagctagaaaaactgagacctagatgggttaagaaactctagtcagtaatcagaggaactaattcaaatgtagatctgtctggccccaaatcctctgcttttaatttctatacattctgcttgttgctcatattttattttcccttgccagaactctaaaagaaagaccccagaacacctgtattagtctgctagggctgccatgtcaaaataacaaaactgggtgactttaatagaaaagtatttctcacagtctggaggctgaaagtccgagaccaagatgttggcaagcttgatttgtcctgagtctctttccgtggcttgcagatagtggcctcctcactgtaggtgcacatggactttctttcaggtgacttcatccttggtattttttcctcttcctctgaggatgccagtcctattggatgaggttcccactcttacgaccacagattttatatcagtgatatggactaagttcaggtcatttatatttttaaagtttagctatctacagagactctcagagaagactaaataggaaagggactctgtctgtctgaagtcagcaagggagaaggctgtggagaaactgatctagccattgggatgggctttagcttctatgggcagtttaagtctacaccataacatgtatctatctacaatgctattggtacttactgcttgtctttgtgtcagggtatttgtgacatagtatcttttccacactgagtggcttgtgggtagaacttctattcatgatgtctggtgatttcaataatagtgtcagtttaggtctactaaagtggatctgtatagagctgaaatatctcttcatagagaaaccgagaagtggaatacagagtttactagatagggaaaataattgataatatctttaattataaaagtgataaattcttacagaagataatttaaaacatgcagacaagtaatacctgagaatcctgtcatattgaaactcataatatttgatggaattccttctactactttattcatgttaacaaaattgagctataacctatgtatgatattgaatacatattcccttattatattatgactatatcctatcattaaacatttttgtaaaaatattttgaaatgttttgaataacattatattccatctcatatagcatataatggatatttattaatgcatttaaccatttgagcaatagtatctaatctatctctattttaaatatcttgacatagatattcttatacataaatctttatttgctaggttcctagaagaatagctaaatcaaaggtaatgaacatttgcagaatgtttggtatagtttgtcacattattccaggaaagttgtcagcagtgaattttatattcttaaatatttgattattttacaaaaaaaaaagttattttattttaatttgcattttaaagtactagttatagtgaatacttttctgaataattattaaccttttatattttcctttcattcatctaatcacattcttgatgagcaaaaatttaattggggtaaggaataattttgagacttctccacgagctatcctgttttttctggttacaatcacccacactgtttaaaatgttttaccctctacaatatcagaaacttccctactaacttggtttaatgtcccctcctaaatattcaaagtgtcaacaatttttttctcactcctacttcatttacttgtagtttccctttaggtttccatatagaatcgacattcttcccgtagggtttgccagtggatcttgctgccatggggggcacaagcaaagtaaatgcatttcaattcagaagccacttagcatccaggtggcttggatttttttttcttctttttcttaaatatgaagcattaaaagtcaaaggcattgctgcaccttgagttagtacaaaatttattttaaaatgcatacagttcaaattttttaccttgcataggccataagctagtagtatggtgggtcagttctgacactgaaaaatgaatccagttagagaacctcccgaaggctgttgatgtttgctataataaatagcacacactttaagtcaaactttttcattctgtattcaaaggtaatggatttttcgtaaccatagtaaccttggtgtattctggataaatacgtgaggtatatacattctagttttatttttgaatataaactaccacattatgtattactaataatatgaaaaataggatgtaggttagtataatgacagcttaaactagtatgcattttccttctgcaaaaaataaatatttatcaaaagtataggttcaattaatttttctcccagttttgtggtattctggtggtgccatttatctttttttccaagatctccattaatctcttatttctgtcccataacagatttttaagaattttgaggtaaaaacaattgtactttaaagcttatgattaaaaacataatcgaaagattgaaggacctatattgatatcactagcagagctattgtgggccacttaagatgtgtgtatacagtacattcccaaacaagtagacaaaagaaatccttcatgagactgttcaacataccaggattgtttcaaagttcaggctggacagcacctgatcgatgatgactatccagactgtagccacagattattcttattttaaacgagcaccctaccagaaactggccgtttttaagaagtttataagatgtttccaaaaagcctacaaactttttagaaacaaaaatagcaagatggtgctaatcaggacaagtctccaccaaacccggcaaggaggtttatgcgagttgtgcttcctagttagaaaatactacctgaattgcttttggttaagccaacctaagccattgctgtggataatgactagaactccaaaagaggaaaggttaatagggacattatagaaaaataacaactatctcacaccaagccataacacgtgtgttttcaaatgtatcatctgataaatctacatagtcatcttatagttaaataagagtgactgatatctagaaccatagatagtgtcttcccactgctgttccatcaggacctggatttctatcactaagactgaggcagtaagatatagataatagcaatgtaatgagtgtgtgcatgcgtgtgtgtgtgtgtgtgtgtgtgtgtgtgtgtgtgtaattgagagacagaaaaataaagagagggtagaaaggcagatgtgggcagggggaaagagggaggaaaagtggatgaattctggtaaaatcatataggcaataattatttatgtctaaccaactaaaagtgctaaaactttttttttggtcttatttgccaaggtcaaagagaactatgtgtaaatagcaaaatagaaatgctcatcttaaactttccaaacacttaagtcttacgatgggaaatttattgacgaagaagctgtattgcttatggcacaataaaaacacatttaaaggttaggcacttctatccgagcgttataaggaaccttatcagcactctacaaatttgagctaaattatactcattcacaccaatggcttacagaagctcttttcttagcaaaatagaattttactttaacctagatattttctttattttgcatatttaaatatcacattgcagtacattgaaataactcctcttacataaaaatactattacctaaaggaatgctgttaacacgcctgtgttctgttacaagctctaatattaataaagcagagcatgtgaggatttccaggtaagatgacggtctcatccatgagtcaccatgccactctattacaaacgaggtcataccatgtttccctttgatgtctcagtcatatagtattaaattgtacaaagtctgagaaactttaaggacacgaaggaacaaaagtcaagctatgcaataagtagagccttcaaagccaaattactaagctactaactctgtgaccagagactccagaatagttgttcaaggttgttctatataccagatctttgggttaatgaacagtggatgctatactctcaagagtcttattcatcgagcaacaaagggtcaaatgaaatgaaataacttgtacagaatgtttgaatatcagttgtggttagctgtaaacaatacaacctaagtgtcgttcttccattaaggtgcttctataatgcacccgtatgtgaagaaataaaatatgtttaaatttacattttaagacccgtacccaaatattatatgatctgttaacctaattaaggaatattatgttcgtaaatgatagggaaagattctatgcttaaagggattttagaagaatcatgggaataatattcagttagaaaagcaatggagttaaatgctggaaagataacggaatatgtccttcagttgaaagtgttacaaatagaggtgtcctgttattttcagcattttgagagttgctatgattttttatgtacgttttaaagtgcttaaattgagttataaattaatacagaaaagtggacacatcttaagggtacagcttgatggatatttacaaaggaaacacatctatggaatctgtacccaaaacaagaaacagaacattgtcagcaccctgtaaagctcctcattttgtggcctcaaatcttgactcaggtgattgctttcctgagtgttgacaccataaactgattttgctaattttgtactcaatataaatagaataagaaagtggagggggggtcttcaaaaagcttatggaaaatgcatattatgaaaaatgtgaggatttcaattttttccaccaaaataaactcatactaacttgttataacattcctgaaccagatctagtttgaggtggtaagaaagttaagacatcagtctgaaacaagcccctaccagggcaacatgaattcagtaaaattgaagcaaggacaaatatcaaatttctggtgaagcttgcatagaagaatagtgaaatcattgatgttttacaaaaagtttttgaggacaatgccccaaagagatcggcagtttacaagtggataactcattttccttaaaggacaaggaacaagacagtattaaagatgaagcctgcagtggcagaccatccacatcaatttagaagggaaaatattcattttgtctgtttcctaattgaggaagacaaacaattaacaaccaacatcatacacatctcaattggttcactttgtacaattctgactgaaaaattaaagttgaggacattaaacttagcaagctaacataggaacggaaaaccaaataccacatgttctcacttataagtgagagctaaatgatgagactcatggacacatagaggggaactacacatactggggcttttcagaggtggagggtagcaggagggagaggattaggaaaaaaaaaaaactaatgggtactagacttaatacctgggtgatgaaataatctgtacaccaaacccccatgacacaaggttacctatgtaacaagcctgcccttgtacccctaaacttaaaataaaagttaaaaaaaagttgagtgaactttctacttagtgggtgccaaaactgttgcacccagatcagctacagacaagagcagagctttcaatggaaattttaaacaggtggaatcaatatcctgaaacattttatcaaataattgtaataggagttgaaatatggctttaccagtacaatcctgaaaacaaagaacaatcaaagcaatggctactaagaggtggaagtggttcactcaaagcaaaagtggaccagtcaagagcaaaggtcatggcaaaagttttttggggatgcttgaggcattttgcttgttggttttctggaggaccaaaaaacaataacatctgctaatgatgacagtgttttgagaatgttagccaaagctttagcattaaaatgcccaggacagcttcactagagtccttcttcaccatgatgatgcccctgctcattcctctcattgaacatgagaaattgtatgacagttttcacggaaaatcattaggatcttacagttctgatttggttccttctgacttcttttcgtttcctaatcttaaaaaaatctttaaggagcacccatttttcttcagttaataatgtaaaaaagactgcattgacatggttaaattcccagaacagtcagttattcagagatggactaagtggctggtatcatcacttacaaaaatgtcttgaccttgattgagcttatgttgagaaacaaaggttatatttttattttttaattccattttccatgaaatttttgtagttcccttatatgttctcttttgtcactgtctttttcttagagatataggagggagagtaaatcagtacaacaattttttgtgttcctgtacctacattcagaaccctctgatctacaggcaattgctaagatgttgttagttgttaaattcctgtcttccagaaagccattggaaaatttgcaaactgaaacatctacctctttctccaagttcagatctagaaaataattatagaaatgcttcatctgtgcaattagaatttagcacatgaagtcactgacccgtgtacactagcaacaaacaaaccatataaaccattctgagtttccaacaatgtaatgttgtgtgaccataaagtttatgatgctgtagaaaaatatttaatttggaaagataataacaacaaatattttacacatatttgagtctaattcgttaaaatatatgtgtatatacatagatacatatacatggatgtgtacatatacatatataggtatgtccccatatggacatataccaaaatactaatagtgattatctcttaataatgggagtctggtattgcttttttttcttttccttgagagtcgttcaatcttttaaattctctacagtttggatattagaagtcagattctttttgtaatgttattcccaattttaatatatgtgataaaattgatagaaaggaaagaaatttcgggaacctgactacacttaaccattaatacttatctctagttttccctagtcttcaccttatatttaatcaggttgatcgtcttactaatttccttctagccaataccatagatgacctctagcactatctaccaccatcaaaacgttatgtatatttgatgatctacctcaattcccacatcttcatttgactcatagactcttccatatcaaattcctacacatttgtcatttggacacattctatcttgcaatattgacttattttcaaaggagtaaatcttgattaaaaataagaatgtaagtgcattggttacagttattatgccattatttattttcaaaatttctgtaatatctcacataggaataaggacccaactggcatccaacaaactcactgaattgagtttaaatgaattaagttgaaaaaacactgagactcagtaaattaatattttagagaaaataacaataaataccaatgcataatttggatataattaacatgctaaacttggtaaacaattttattgaggtaggctttcctgtagcttaggatttttcatttaatcatccaatatatagcaaatatatacaaatatttgttgctcaattatgtgttttagcttgctaagactattgtaacaaagtaacacaaactagatggcttaaacaacagaaattgactgtctcacacttctagagacagggagtcccagatcaagatattggcaagactggtttcttctgaaggctatgaggaggaatctgtttcatccctctctccttgttttggttgtttgctggcgatatttggcatttcttgattgtatatgaatcatcccaatctctgccatcatcttcacataatgttttccctgtgtgcttatctgtgtacaaatttctcctttttataaggacactagtcatattggatttgggcccaccttgttgagctcatctgagctaattacaactgcagttctagaggctaggacttcaacatatgaattttggggagaacacaattcaacgtgtaactctagtgctgtgcatttgatgctgtgattaataacattctaaaactttcctgaaatacctaaaacatattagagaatttaaggtgtgtgttcacaatcagttttaagatggatatggcccatgacagtaatgaaaatatttagaaaaggtgataatcaattccatctggaatgctcccagccttactttttgcatcttcacaatcacatctcttacttccctggcttgctttctttgattctttataggagtgattagtttcctagtgctgcttaatacaatacccaaaatgggatgccttaacacaatagaaatgtattctcttgaagtttgagaggctagaagtttgaaatgaaggtatcagtaggcccattgtctctctgaaaactgtaggggagaatccttccttgcctatcccgccctccagtggtttctggcagtcagtggtattctgacagtcagtggtttctggcaggtgtctgtcagtcagtggtatcctggcagtcagtggcttgcagttgcgtcaccccaatctctgcttgtatcattacatagtgttttcccttcttctaaagttctctcctcctctaaggataacagtcatattcaatttagggctccccgtctttcagtatgacctcaacttaacttcatgacatctgcaaataccttattttcaaatgaggtgacattcacatgtacagggagttaaaacatggagataccttttgggaggacaaaattcaatccactacacctccattgactccacaactactttgccactcagttgaaactgttctcacctagattgtcaatgttctggtagtctccaattcagggacagagtggaggttgtataattcatgatgttttattgatgattcctccatctcagaacattcttctcttggtgtctgtgatacctcaccttctcaattttccctattactgttcaagctctggtgtgatctcttcctcattttcttccacgcacaaatgttggtttcccccaggattcctcttgaaacattccacacaatctccctttgaaaactcagtagtccttgtcttcagatatttttcctaagccatgaacatttttctcactgcatattgggcactcctgctacaagtgtttttactccaactccttaaaactgaatttattttatctgccacatcctaccaatgtgctcttttttctgagttttttatctttgggaaaagtaacactattcattctttttcccaaacaaaaacccagcattaatctttgattactcctccttcatccttcacatccaaacttttttgctgttcttgttttaagacagggtcttcctgtgtcacccaggctggatggagtgcagtggcgcattcacagctcactgcagcctcgacctcttgggctcaaatgatcctcttgcctcccgagtagctggggccacaggtgcatgccactacacctggctaatttttgtagagatgaggtttcaccatgttgcccaggctggtcttgaactcctgagctcaagagatctgcacatccagtcttaaaatccaaactgctgttgccctattacacttatcacctggctcctatctactttcttagccttatatcattcttttattctcatttatttctacaacactacattggttttctatttctgttggtttgttttgtgaaataccacatgccttttcctacatgcagacttttgaactttctgttcactctgactggaatttactttccccagttctttacatggctgaatcattgtcttccttgagttctcagatcttataaaaccttctctatatttgttagaataacctagatgttataagcatacacacatatacatacagagagatgatagtttttaatagtgaaaacacaataaaagtttatttcttgttcacttagcattgagtgcatacaaagtttggtccacagagtttcctttttctgcacagtcattcaggaatgcaggcagatgcagattcagattctgtcttatttaacacatgacttccaagggagctctggagttatttccattgctacagcagatgaggaagaagattgagagatcatcatggcagattgttatgggccaggcctgggagtgaaggtattaaagcaataccttgtactaactcaaagttctgtaaatcagaaatttgggtggatttaattgggttcgtaattagggctttacaaggccaaaatcaagagttggggcagtttgggctctcatctgaaggctctgggaaataattcacttctagactcattcaggttgctggctgaattcagtttcttgcagtggtaaggccaaggtccctgtttccatgttgcctgtcagtcatgagctgctatcagcttctaggggccacctcaggtcctttcacatggctccctccatctcaatgatggaggatatccagtccccctcatgcttcaaatctctctgacttttgcctccagctggagaaaacactctgctttaaattgctcgtagttagtttgcacccaccaggattcatttccttttctccatataaggtaagataatcataagtgtgatatctcatgaaattcacagattccacccacactcaaagggggaaaattgtatataggtgtgtgtcactgggagtcattcttagaattcttcctaccacaggttcagaagcagaatcactcaagcatggttcttaccctgtgaccttactaagccttggtttcctggtagaatggtaacaacagtacctactttagggatttagtataaaaattaaatgtgatagtgcatataaaaagattagcataggtcccataactcttctaaaaatggtaaataatcaacaacccatgctattagtcgcagaaataaggaaattattgttatatcatcataaatattcttaatgcaaaacatcctctgcatgcaaaaaaaaagcatgtctctaaacttcatgttcaatttaactcagaaaatatttgttgagcaggtactatgtacctcagaggttagaagttatttataaaactaagatactgtcattcttcctcaaatcattcccagttcaattgcttagacagaaatacataaaactaaatagaatgctgtccaacctgtggtaaattctgtaacatgtgtgacaacaaaagagaagggttcaacccagtgtggaagataaagtgtcacagaagaatgttcacaggctttagagtcgagtttaagaactgaggaacaggcaaacataaggaccatggttgcgtagtcactagacacagaactattaatgcgcatttcacaaaaattaaagagggaagagtttaatatgagtgtgcaccctgggtaagtaatcaatagtgagaagcaaggtgggattgagattatcaaaggtgctaagttatgttgagatatttgaactttgttctgaagcaagagagaaccattgaaggattttcagaaataccacaagacaatcagtgctttagaaaacacatagttggaacatatcattgcttcaacatagcgaagactgagtctgtgtagctgttttctccatttagcaggcataaggacaagtgggttagaacactaaatgcaagaagctaattggacttaacaatacagatggcaaaaggatgaggagaggagagaaacgcattatgtttatttgttaacagctctattgtattgtatttatatgcattagtcagtgtaaaataaaatctgcttattttaaatccttttaaatagtgtttaaatatttcctgatgacacaatctgctaaagtatttacccttggtgcagatttccattaaccttgctgtagatactaagcctacaaccatatatttatagggggctcaattatggggtaaagcctagtgacatcattataaaagcacatctggataagctttagggtctttgtctttctatctgatttaggaaatttagtaaactgtaggagaataccattattaacagcccctgaattctcagattatgaggatgtcctttctctcaaaataaaggaagagagggattaaaatctctaaagctgtaaatgatatagagaaatgcccagtacacagatatcagggatattaggggaatccagttgtgttggatatacaagaagaaaaaaaaggcagaaattaaattcaaagtattctttcctcatgtcttttgtcagtttttttttattgttttttagagagtctatataaatcctttggttccctaaaggacaaaattcctttgataattttacaaattcttttctaaatagtatctctgtattgtagattaaaaaaattaatacctaggaaaggtcaggtcacttctttcagtcaaggaatgactcattcatgaaactggaaagaaaacttctttttcactcaccccaatacttgatagctatcttaaattgaatatgtctttaacagtatatttgatattatcagtgtattttgatttatatatatatatcgtatatattatatatctgtgatatatatctatatatcatttatatatctgtgatatatatctatatatcatttatatatctgtgatatatatctatatatcatttatatatctgtgatatatatctatatatcatttatatatctgtgatatatatctatatatcatatatattatatgtctgtgatatatatctatatatcatatatattatatgtctgtgatatatatctatatatcatatatatatctgtgatgtatatctatatatcatatatattatatatctgtgatgtatatctatatatcatatatattatatatctgtgatatatatctatatatcttatatattatatatctgtgatacatatctatatatcatatatattatatatctgtgatgtatatctatatatcatatataatatatgtgtgatgtagatctatatatcatatatattatatatctgttatgtatatctatatatcatatatattatatatctgttatgtatatcatatataccatatattatatatctgtgatgtatatcatatatatcatatattatatatctgtgatatatcatatataccatatattatatatctgtgatatatatcatatatatcatatattatatatctatgatatatctatatctctctctatctatctatcacattttctttaaccattctatcagtgatgggcatttaggttgattccatgtctttgctatcatgaatagtgctgtgatgaacatttcttttgatttttattgtctgtgttaggacatcataacagggccctcctaataccattaacaacgcatcatgaccctggtaatggttttgtagctgaagtctagatagtttaagtgccctatcttattcatttgtacatattcaatatatataataactactattttctggacgttaagagaattgctgaaaatacagtggtaaactgcaatgaccctatatatcctggtttgtacactgttttatcttctgtttcagttaccttgcttaaatcttgtggctatatgacactaataaaagttaccaaatttgtaataaatagcatcacaaatatttcattgtgcttgagattgtttcaaaggttttgatttttctggctatacacacacatatgtaacataacataattaaaaatgtaatgaacatcactagactactagttaaacaagttatggctaataactaatatgtacacaaaatatgtggacacaatagaacaagcaaatctttatcaataggagaatatcttcaaagtgtatattgtaaagcacttgtgcagaaaagtatattctatattctgctaatgtttatttgtttggttatatgtatgtagactacatctggaggcatacatataaattcaataattgctaaattcctaggagaaaactgggtaatagtgacacaaaggtggagagagtcttaatttttatgtaaggtcttctgtacattttggctatcgtaccatgaatatatattaatgcattattcattcaaaattaagtacaatttaaaaataaaattactacaaaatggtaaattttaaatgttaaagaaaacttggaaaaatataaagaaaaattcaaattgtccacaattttatctaccagacacaatcactaattatattttggcttatgcatttaaagtctgtttttttattattaaagcacagatacaaacatataattgggaccagactgttttacaactttttaccactttataatatactaagcttattaccaaattgcttgctcagcattcttttatgtaacattttgtgtatgtgcattttaagttttttaaaattaataccacaaatgtgtttatgcattatttaaaatgatatattcttcttcctattttgtaaatgttttaatatatatgaaggatgctaaccatttgcatgcactctatatgacagttatttttttccgctttgtcttttgtatttttttactttgtttatggtggtttttaaattaagacatttttaaaacttgtagtcaattcaaatttagatatattttccagcatagtgtcttccttaaatagaaacacttagattttcttcacttcaagaatagataaatatttcctgagattttctttgataatttatactttcaaaaatattttcacatattccagcttctgtgaatatttttatttatttatttatttatttattcatttatttattgagacagggtctcactctgtcgcccaggctggtgtgtagtagaatgattttggctcactgcaaccccgcctcctgggttcaagccattctcctgccttagtctcctgagtagctgcgattacaggcatgcaccaccacacccagctaatttttgtacttttagtagagacagggtttcaccgtgttagcccggctggtctcgaactcctgacctcaagtattccgcccaccttggcttcccaaagtgctgagattacaggcatgagccactgcacccggccacttctgtgaatctttaaattacccaatgatgtgtataagggttcaaattttattcccattttctcagtgaagaaatagagattctgaaaactgatttgatatgcctgaaatcataaagttagttaatgtcatcgctaggactagaattttggtgcttacacaatgtgctgactcccaaatcgtaaatttctaccagatgtttaaagtaaaagaatgatgggaaatttcattaaactattaactatattcagtggtttcaaaatattaatacaacattgatatctttagtgcattatcaatgtattcttggagacaacatgtcaattaaattgtctcttattcaaatgttaacttcagtttttaaaatttaaagctagtctgctgattttcaataagagctgtctaatattgtgaactagtgaatttgaggagataaaagtggaaattataggtctgcagagtgtagcattgataaagagggggccatttcttccaagtcagtaaagaaaagtgatgaaacataaactggaatttttgtgattctactgttgcatgaccttataacacccctgttttaattaactacggacctgaaataataacgtatatttctaatccactcacaggaatggtaggtatattagttagctagggctgccatgacaaaatacaggctgagtggcttaaacaacaggaatgtattgtcttacagttctgggtgctagaagtccaaggcaaaggtttccataggttaggtttcctctgaggcctctctccttggcttacaaattgccgccttcttgcaatgttcttacgtggtcttttctttgtacacgcacaccctggtgtctttattcccatccaaattttctcttcttataagggcatctgtccgattgaattaaggctcatcataatggccttattttgacttaattacctctttaaagaccacatccccaaatatggttacattctgaagattagaatgtcaatttatgaattttggacggacaaaattcagcctatagcagagggtctgctttgcaatgattatgcactattactcaccaaggtagtaaaaattaagcaaacatttatatacacaagtttttgaggggataaagcctacagaatataagaacaaaatattttcaagaatgcctgtctgtggttctttcattaattcacttcttcattcatctttattgagtacgataatgaggcagggaaaatataaccatctgactatgaattgacctggtgcttgtagacatatgtggtttaacagttttccactttgtgtacccctctctcataacatgtagcatactctgctagaattattgattgattaacctcattgtctttctcactagatcatgagtactttgagggcaggaactttatctttcatctttcatcctgaagacatggatcagcatatgtgtatagtaggagaacaataaatagttttcagaatgaaggggagaattaattttttcatgaaaactagatgtcattatgtggagaatttatcagaatgccagactggtaaggatgttcagagacacagtagttgacctaagactaacctaaatctgtttgtatcacagaagtgtaccaatgcttgacatacattggataaaatgtttatttcctatttctctgtattgtttggccacatgactattgcaaagctcataagcacaaaatttgcacaaaacccctgagagatgccatccatggctacaaatacatgttttgattatattaaagtaaaaaaattgatcaattattttaaatattcaaggtagttaagtgaataaattctatgtaattacaaccacaaggttggtgcatattttagaaataaatgcttgttttactatgagaggaaaactgcgaatggcacacgacctaaacaagggcatcctgtttgcttggatgaaaattccatccccatgtttactataccttccactctcattcaaacctagaacaggagaaaaatagttcgagtttaaaaacaaatccagtagagtttaggaaagtttgtctcgtataccacacctttaaaaggctattttgcaatgacaatattcttgtattgccctctctatttttccctccctattgtatacatgagcccagcaacttctagaatatactagcacatatgaaatttttgaatatctatttcatgtagggagattagaaagtcactttctgccacttgtgtagctctattatgcaaaaatcaagaggatgcagatcataaatcccattagggtggaactctggatgtggaaaagactatatagataattttaagagatttcccctcagctgaatcattgctataaagttaagcatggtttttaaaatataaatcaaataaatggtttctataaaggcacatacctttactgtaaactgaactccaacaaacttttgagtggacatttctcaaatacagcatctattgaaaacttcctctgaaaaaacatttcataaaaattgaagcttgccttacatattttcatactatgtggttttaatgaccgttgtattccactctatcaccataaataaatatgtgactttaaaagatatgttgtaaataaaattagctcgaaaatactaacactaaccaaacattaatcacagaatttaaggagactatcagagactaattcagaaaataaaaatattgtaaaattactaccatgaaagctctaagaaaagttcatgataatttcagtgatgctaaggctacagaccaaatataaacttagaaacaaaagtatttagtctaagacaaattaaatgtgtatatattaatttattttctctgtttgatgggcatagaagcccatcaatactctgaatttatattttattaatactctcacaatttactttcatatgtgacttactatgtaatataaaaaacaaaagagcttgaaaaactgagatcagagggcaacaataaaatattaatgctaatattatcttgaatttttatctatacatatttaaatgttgttatcctcactgaaatttgttactaatcagtgaaactttagtatttacctaaattagttcttcttataagtagctcaatctccataataggagatagactataatttgtactttagcataaatattcttctaaaatcattcaccgttttatattgtaattgactgaaacaatataaagtggcttaaaatcattggtatattataaaacctatgtcagataaaacatggcatctgtgaagtttgggaattataacccagaacagtgtataattcaaaacagatacctgaaattatcttgtacacatctcgctatctgctatatctcatcacataaaatgcatagtagatgcacaaagtagctgtccaacaaatacttatggaattaataaatgaaggaatgacaaaaatgcttttcctcaatgtgctaagtcaaatacatgtttccttttataaaaatttaactatatgttttagatttagttgaaaaaatctatactggaatttacataattacataatacatattttaaagtattattcccagtatttatgaacattcattaatgagaatggcttctacattaaaagatcagttagcctctgctatttttgataatgatttaaacttgttaattcttacctgtataatgcattctcctttacaaaatgctggtatggccacttgttttatgttatcctcacaacaattgtaggtatagatgtgataaataatatactcttcctattctgtttttctttttaacaaatgagaaaactgaggcctaaagctccagtgattcactcatgtttacacaaataactctaaactggcgctcagctcttgctaattctttgtctcctcttttgttttgtttttgtttcattttgtttccctaaaccataatgccatccaatattatttaaagtttgcctgcctgcttttgcaatggttcttagctttccacaatagcaagtgcatcaaagaagaaaaaggaaatgattatatggttattaatcaaactcagatatggctagtaccacctttataagtgaaacttatataacaatctcagtttatgtcagtctcttatcccagtgtttaaagttttaaggactgagctgggaatgtgaggaggcttttgcttttcattttgtactctactagttttaatttttcactatgtgcatacatctgcaccccaacctttaaagaattagtttcctgaaaaaaaaggaaaatgcaattcatcgtacaaataaaagcataatcccttttattaatttttagctaacaaacacataataccatcctattccaggtactgtttttaaatgacttgtatctaaatgtaatgttaacgcatactttcgatgtgcataaatatagccaagcagtcctaaattcagataaattatcttccatctactgtatataattatatagtatttcctaatttttataaaatatggtttgtgtgtatgtatactgttactcaaatgaggttttgttgtttttctctcctcaaggtcaaaaacaatatctcactctatcttttgtgtcttttgttttttgatttttttttttttttttttttttgtctgctttgaacagtttttaagaggaaaagaagaaaaggtgtttgggggttacataaaaaaagggagaaagagacccaaatctcctgtctcttttatcacctacaaactgtattgattttcactttcctttcctaaatccatgctttaaagacattgtccatctaagaaacatagagtcccaaagcacaagttttgatgtagtgagcacccattgattgtaccttgaagtggatgtaggtaaacagatgacagatagatcaggtagatatatagatatagatatagatagatttatcttgaattttcctagatcccattaatctgaatgtacaaataagtctcattagttctaatatttgtatttcactgcctcattgccctcacctgctgtagatgatctctgcctccagcaaactaatcctcatgcatttctggggagtccatatgggttttctcacttgcacttaggatcaagctggacaccaattggctaagtgccacggttactccactgggcatctccatgtcccttctctggataaacaccatcatctatgggcataaggagcactgctattcttccattgctgctccaccaggtacctgagctctcccactgctgtgccaggtggaatagttttccaccaggggccaccttagatattcctcgtcaggtgagtaccaggactgctttgctaggtagagctgtcccagtcgattctaatatgcccctctgctgttatatctgtatcactgttctgtattctgctagtaccaaagctgaatgagactatgttaaaagtagtggtggaaaaatgtctttcttccttgcctccctctttcttaagtgagtcctaaaagaatactgagtagattttggtatcttaaaggtttaacaaaacagatcttctttgttttactctaaatacaaatctgagtaaactagccaaggctctcagaatgatctctctcttctgagaaccagggcaccatacctggctccgatttctctcatggtgaattcttcaaaatgttttccagtgcatgggctttcgctgggttatctcccacgttgttcacaatgttcagagatatctgagttaacagcacacccagaggtgttccctctttccatgactgtcccccacaaccccacgccaagaatgccactccccagttctaatggcagtatgctgctggtagcctggccacctgtctcagtccatttagtgttcctataaaggaatcacccaagactgggtaatttataaagaaaagaggtttaattggctcacggttctggaggctgtacaggaagcatggcagcatctgattctgaggaggcctcagggagcttttactcatggtggaaggtgaaggggagcagatatatcatgatgagagaagaagcaagagagagagagagaggaggaagtgtcaggctctttttcaacagccagttcttgtgggagctaagagtgagaactcattcactcccatgagaatgatgccaagccactcatgagggatctgaccccaagatccaaacacctcctaaaaggctcagcctcaatgttggggatcaaattgcaacatgagatttggcagggccaaacaaaccctatccaaaccatagcaccacccaatttgccagatatacccaggcagatctaaatatatcttacactcacaatcaggtcctccttttatgagataccaaagatgttccattagggttctcagacaaacagaatggagaaagagagatttattgtaaggaattggctcacatgactgtgggagctgacaaatctaaaatctgaagtctgcagggcatgttagcaggctagatatccagggaagagttagtgttgtagtcttgggaccaaaatcttcagggcacgtattagtctgttctcacgctgctaatagagacatactcaagactgggtaatttataaaaaaggaggtttaattgactcactgttccacatggctgtggaggcctcataatcatggcagaagagcaagagatgtcttacatggcagcagacaatagagaatgagaaccaagcgaaaggggaaacctcttataaaatggtcagatcttatgagacttattcactaccacgagaacagtatgggggaaactgcctccatgattcaatcatctcccaccgggtccctcccacaacacgtgggaattatgggagctacaattcaagatgagatctgggcagggacacagccaaaccacatcagggcagatgagaggtttttgttcctcatgacacaaaatgtggtgtcttttccaacaccacttcttcaattctctgacactcactaggcatgctatagttcagctcagttctgacagtaactacctggagttagagtaagactccatagatttaagagcccagtcccacaagactaccttcccttcagaggccaggcacaagtattgagtccccactttagccacaattctctccagctgagctacacagtcttgggttcccacaaccccctcttcagggttgataatttgctagaatgactcacagaactcaagaaaatgctctacttactattgcagtttattttaaaggatgcatataaacagccagatgacaaacctcctcaaattctgtttaggggcttttaggaggtttcatgacataggcatgattgatcaaatcattagccattgatgattgactcaatttccagccactccccttctcccaagcggttgctgattgagtagtgaagctgaaagttccaagcttctaatcaaggtttggtctttctggggaacagcccttattttgaagtagtctaggggccgtctgacagtcacttaattagaacaaaagatgctactatcatctttatcactcagaaaattccaaggattttaagagttctgtgccagaaacctggtacaaagaccaaatatcttcttatatcactgcaggccagcagactggaaactcccatagaatttttatcatgcagtcttgaggcagaattctttcatctttgggaaatttcaatctttgctctaaaggctttcaactgatcggatgtggccaacccatactatgtagggtaatttacttaaagtcaactatctataaataaatgttaatcacatctaaataataactttatagcaacatttagattggtgtttgatcaaacaagtggataccatagcctggccaagttgtcacacaaaagtaaccatcacagatgtattattttatttaaaatcatcagtattatatgaattaattcagaaataaaaaaggtgttgtcatagtgtgaacacttataagtgtctttcccacagaaatgtcaacagactgtgatttgaaaattgctgttttaaaagagaaaagctcatcattctacagaaatgattcaaagatagacaatccattaaatatcttataatgggccaaatactactagttgttaatttacacttgcaacatcaaacactttaccagctttttaacatgcaactgttgcatatgatgcattgtgttttttgcaagtaggtatacagcataattctaataggatatttatttacaacctaaccttacaatttaaagtctgctactccattgtgctcatcctacccgctgtcttcttatattcaaagctattaaggagtacttgctcagcatatcactccaaattaaactgcaagacattttatgatgaattaaatgggtgacgctctcccagcctttgtaactactagagcaagtatccaagaagcagacaattttatcacaaaattctgattgccaagttgtttttattaaatagacatacagtagagaatttaatcttagaaagcatctaacataaacacagatttctcgttttatagatgaataaactaagatccaatgagggcaactatttttttccaagttcatgcaggcagctaacaccagaacaaagactaaacaaagctcttctaacttctccccccatttttatcatccattgcattcattactacaaaattactacaaaattattagcctggtctttaatggtggccccaaagaatggtttttagtattacttccttcacttctttcgtatgtcctgtgctccagctaaactgaactatgttgaactaagctaaacatttctccttaagcttgtactgcattttgctacagtctttttgccaactcttcccatccagaatgtcttcactctctatctccactgctttaaaacctaagcaattttcaatttaagttctatctcctttttgaagtattgtatattcttctagccagataaaattctaggaaaatattgtcatacttgactgcataaagatttaaattgtctatatagcaaaataaaaccattattgaaatgataaaacaagtgacaaactagaacaaaatactttatagcatacttatttaataaatatctattgatagcttgctaagtaataggcactatactaggtgctatatccaagtaatgttgacttattagctttcaattagaaaaagagaaacactattagatatgggtcaattagataaacaggcacatccaaaaagaaaaaaatatgtaaatatagtcacagagataataataataataataaatgagatgctacttaacatttttcaaatgtgtaaatattttttaaaattagatttttccatattgattagaagatggagaaaagagctctttcacataatgctgctgtgaatgaaaattggcaatttatatcataatgtgccacagttttgttctgtatggtctcaatcccccctgtaaatgtgtgctctacttttctctaccttgtcctgagctttagcctctggattctctttgggttctgccaacgtaagacacaataaagagaacaacagacaggagggaatgaggccgaagtgtttattcctcaggctctgtgcttgcaagggtccccaggctctgtgcttgcaagggttcagatgggcagtagctgttcctccattgaggggaggcccttcctacagtacagctgtctttccagctggatgtggtcctcagcctaaggcagcaatggcttggtctgtgtttagccactagctgcgttcttattcttgaatgtgccccttaagcctggcccaaatcctgtaaatagtccctgacatatttctcttcaataattccatttcagtgtgccatcttctcccttgtcaggaggaccccaaatgatccctctttgactgggaaattctacttctaagagtttatgcttaaggtgtaattaagaatgtacccaataatacagtaatccatattaaatgttataatagtagtaaaaatgacactagtgaagcacaaaagagaaattaatccaaactgaaagagtttgagaaggtttcttatagggtgtggcatttgatttgtgtcttaagggtagcatgagactatgccaaaaaagaaatgtgtatgtcttgccacccaaaagagatatcttggccattgaggatagagattcattactttcttatgctatataaggcgtagtatagggctaggttgaaatagtattaaaataatatttaaggattgattataggttttcattgagaaccattctcaggtgatactttactaagctgacaatagacttagcactgcctggcaaacagcaagtagcagtcagtgatatagccatgattattactgaattaacagcatcttaatcttcactacgatatttgaaagggaacactgattcataaacctactcttttcctgccacaggtagtcaggaacttattattcttattatgtctcattattaacttctgttgcctaacaagatattatatattgtatgtcacatgaatattttcttacaaagtattaattgattcctaatcttgttaaagaatatgatagtagcaaatatccaactaattctgagagaaaaacctccagttttgcaagaaagatttagccaagttatgcaactaagtttgttcaaataataactctataaagttatctcgattatctcctctttagtttatgaatcgaaagcattgatgaagatcaaaagctaactgatgcctccctaattctatatctatccttgtgcagaggcaaagtaggggagtcagtaggatgtttgtgtgtgtgcgtgtgtgtttttgtatgtgtgtgtagatggagacagagaaccatagcaagatagagagagaacacgagaggagactgagagagaaggaaagagggaggaagggatggatggatgaaacgaggggctttctctcattttatatcataaaagtaaccaagaaaaaaatcctgggttcaatattttataattattacaaatggggtattagagatgttcaggaagccagagtagaaggcagctagctaagaatgctgtcagcctaaggagtttttcatggacgcctttttattctaaccagccacagaagaaaagagggaaatgaagaagcatcatccttcactatcacaactgacaataagggttctcccttacctcccacccccgcccccactacacacacacacacacacaaagtagtgactgaaaaccctcagcaggctgggctcccctaccacatgccacctgctgcaaatgtgttggaggcaccaggtcctcctttcttttttgccagttttcttattgcagaaaggttttactattcaacaattaggagtgtccaaggtgttaggggtcataagatacatccttgttctcaaagcgcttataacactgtaactactgatgactggtataaggatgcttacaagagaaatttattaaaagggcaactcagtagagtacaaactacgcatatgttgaagagagtcaggagatgtttcatggataatgcaaacattgaacagggttttcatgaaagggagggatgtggatttctctgataaggtggaaaacataagcacaaatggaagaatttgttgagtttagtatgtggtttgtgttcagttttaaatataagtccttatcatagcaaagcgatttcttttctttttgtttttgttttttccttttttaaattattttactttaagttctagggtacatgtgcaaaacgtgcaggtttgttacatatgtatacatgtgccatgttggtgtgatgcacttgttaactcgtcatttacattaggtatatctcctaatgctatccctcccctccccgcccaccccccagcaggccctggtgtgtgatgttccccaccctgtgtccatgtgctctcattgttcagttcccacctatgagtgagaacatgcggtgtttggttttctgtccttgcaatagtttgcccagaatgatggtttccagcttcatccatgtccctgcaaaggacatgaactcatccttttttatggctacatagtattccatggtgtatatgtaccaaattttcttaatccagtctttcattgatggacgtttgggttggttccaagtctttgctattgtgaatagtgcggcaataaacatacgtatgcatgtgtctttatagcagcatgatttataatcctttgggtatatgcccagtaatgggatagctaggtcaagtggtatttctagttctagatccagacacatgaaaaaatgctcatcatcactggccatcagagaaatgcaaatcaaaaccacaatgagataccatctcacaccagttagcatggcgatcattaaaaagtcagaaaacagaaggtgctggagaggatgtggagaaataggaatgcttttacactgttggtgggactgtaaactagttcaaccattgtggaagacagtgtggcgattcctcaaagtgatttcaactctacagatcagtttgaaagcacaggactggatctcagtgatggttaattgctcatctggccaaagaaaagcatgttgcaaggttaaggctcctatgaggaaaaggagagcaaggatgttcaggctgaataaagcccctgtttttattaattataaggtcagaatctggttctcctggaatcaaaatgctgagcaagcaattgtggagcaagggctacacaatggcagagatgaatgcaacctgatattccacatgcattctggcgcagctcattgcttttcaggcatctacgagaaacatatcaccccttaggtttgctgccgaagatgtgttctcactgaaccataacctagcagaggttctcaggttggaataccaaatagcaagatgatgtggtcagtgctacctatattgctctaaaatttttaaacatctaattgatgatttgtgggaaggttgcacagagagaagaaaggaaaaccaggaaaaagctgtgtttttaatttatgaaatattaagaagttttcggaagaagacccagacaatatgtattagatcataaagaagcaaaaaagtgctatgtaattttctgatggtagaaacaaataagaagatataaattcctcagtttacaccatgagtttaaagaaaatcatcacctacttactggttcattttgtaaattgagatcaatgaaattctctgaacaacagcatgaaatcaatcgtaaaatagcacataattcatggccagtattgtaaattatagtttgcttgacagtaatcggtaaggtttccatgcactgggatgcatttccttgtaacacgtctaaggataatgcctgtggatccatttctaatgcatattagagtgatctgtttttccctgtccacaactccctgtgtttgatcttatgcaaatgatgcaatcaagcaaatggaaaacaagatgttgttgctcaggggctcttacaaacagtggccttatgttttcagggtttccccaccctccatttacccaactcagatttgtgtacatacctgcaattgtttgaatccgttgatccatttgtgttgcccttgaagtgcctaatcacatctatagagacatattaccaaatcagttgcagttaagctaggaggagagttgtcattactttcctctttgctttaaatttcaaattggtggctttgtttatggcttcactctcaaagaatttatcagcctcacttccctgtaaccaatctttttttcatttctttttgttaactgtttttaaaaactctctcattccattcatacattttacacatgactactccttccccccacgcccaacctgatgcctcctcctcttctccatttttttccctttccctcatcatttcctcctgttttaccaagaatttcccaatcagatcaccgtgcaactttctctgccacatgtcaaattaggttctcttctctctctctctctcttttttcatgctttattattcaaagaacactagtaacatttcatcttcttatggaaatacattgagaataatccactttgggatggacagtacaggcataaaaacaacttggaactcaaaaaagctatttaatcacaatggttttctttgtattatgtttacagttttcagatttttaaaaccaaaagaaaatacccaatttctattgtagtgactttcatgtgagtccgtgtgaagagaccaccaaacaggctttgtgtgagcaataaagctatttatttcacctgggtgcaggtgggctgagtccgaaaagagagtcagcgaagggagataggggtggggctgttttataggatttgggtaggtaaaggaaaattacagtcaaaggggggttgttctctggaggccagagtgggggtcacaaggtactcagtgggggagcttttgagccaggatgagccaggagaaggaatttcacaagacaatgtcatcagttaaggcaggaacaggccattttcacttctttcgtggtggaatgtcagcagttaaggcaggaaccggccatctggatgtgtacgtgcaggtcacaggggatatgatggcttagcttgggctcagaggcctgacattcctgtcttcttatattaataagaaaaataaaatgaaatagtggtaaagtgttgggacagcgaaaattttgggggatggtatggagagataatgggcgatgtttctcagggctgcttcgagcgggattaggggcggcgtgggaacctagagtgggagagattaagctgaagggaggtcttgtggtaaggggtgatattgtggggttgttagaagaaacatttgtcatttagaattattggtgatggcctggatacagttttgtatgaattaaaaactaaatggaataagagaaggagaaaaacaggtataaaaggtctaagtattgggacgactcaggacatctgattagagagtgcctaaggagattcagcatagtcctgccagcaaagattatttatttacttcaagagttaagagtggcagtttggggatagcatgaggagatgtcagctgtgatggcttggagaaacagtgtaaactggcagtgtaaacaagagcaggacatgtatgagtagttgagaacggtgaataggagtatgactagacagaagatagtagggatgacaagtttttttggggcacagtctaagttggtctggtgtctggaatgagactggggcctaataaaaaggagcgtctatacaggagctcaaatgggctgtactttgtagcattccgaggacaggcctgacttctgagaagggaaagtggtaaaagtattgtccagtcctttttaagttggcggctgagcttggtgaggtgtgtttttaaaagacctttagtccgttctacttttcctgaagacggaggaccgtaagggatataaaggtttcactgaatactaagagcctgaaaaactgcttggctgatttggctaataaaggctggtctgttatcagactgtatagaggtgagaaggctaaactgaggaattatgtctgacagaagggaagaaatgactgcggtggccttctcagaccctgtaggaaaggcctgtacttatccagtgaaagtgtctacctagactaagaggtattttagttatctgactaggggcatgttgagtaaagctaatttgccagtcctgggtgggggcaaatccttgagcttgatgtgtagggaagggcctgaataatccctgaggagtagtagaatagcagatggaacactgagaagttatttccttgaggatagatttccatgatgtaaagaaaatgagaggttctaagaggtgggctagtggcttgtactgtagcatagcctgcctttgctggtgtgtgatgattaggcctggtggaactgccatcaataaatcaagcgtgggcgcctgtagtcccagctactggggaggctgaggcaggagaatggcgtgaacccgggaagcggagcttgcagtgagccgagattgcgccactgcagtccgcagtccggcctgggcgacagagcgagactccgtctcaaaaaaaaaaaaaaaaaaaaaaaaaatcaagcgtgatcaggctgaggaacaggaaagaaggaaatatggggaaatggggtgaatgtcaggtggatcagagagatacagtcttgggtgtcaggtgtggtatcaggaataatgtgggaggctggattgaagtccgggccaggaacaatggtaattgtgggacttaacaaagagtgagtacagctgaaggagccgtggagcagaaagtatatgcgtcaggtatgaggaagaaaatagattttggaaattatgagaaatgtagagagtaagttgagcatagtttgtgattttgagggcctctaaagtattagggctgcagcagccgctgcacggagacatgatggctaggctaaaacagtaaggtcaagttgtttggacagaaaggctacagggtgtggtcctggctcttgtgtaagaattctgaccgcactaaccatgcctatgaaggaaaggaattgttgttttgtaagggattgaggtttgggagattaatcagacacgatcagcagggagagcacatgtgtttttatgagaattatgctgagataggtaacagatgaggatgaaatttgggcttgattgaagtaatgggggctatctgtgaagctttgaagtacagcccaggtaatttgctgagcctaatgggtgtcagggtcagtccaagtgaaagcaaagagaggctgggatgacgggtgcaaaggaatagtaaagaaagcatatttgagatccagaacagaataatggattgtggagggaggtattgaggataggagagtatacgggtttggcaccatggggtggataggcaaaacaatttggttgataaggcatagatcctgaactaacttgtaaggcttgtctggttttaggacaggtaaaatgggggaattgtaaggagagtttataggctttaaaaggccatgctgtagcaggcgggtgataacaggctttaatcctttcaaagcatgctgtgaggtgggatattggcattgagaggggtaagggtgattaggttttaatgagatgttaaggggcgcatgatccgtcgccaaggagggagtagaggtatcttatacttgtgggttaaggtcgggggatacaagaggaggacgcaaaggaggctttggattgggaagaggggcagcaatgagatgtagctgtagtccaggaatagtcagggaagcagataatttagttaaagtgtctcagcctaataagggaactgggcaggtggggataactaaaaaggagtgcttaaaagagtattgtctatgttggcaccagagttggagagttttaagaggtttagaagcctggccgtcaatacctgcaacagttatggaggcaagggaaacaggcccttgaaaagaaggtgatgtggagtgagtagcctccgtattgattaagaaggggatggacttaccctccactgtgagagttacctaaagctcggcatccgtgatggtctagggggcttccaaggcgatcgggcagtgtcagtcttcagccactaagccgagaaggggtcagtcagagaaccttgggccagagttccaggggctctgggagtggctgccaggtgagctgaacagtccgatttccagtggggtccggcacagatgggacgtggcttaggaggaatcctgggctgcaggaattccctggcctggtggccagatttctggcacttgtagcaagctcctggaggaggaggttctggaggaaggcctggccgctgcagttcaggcatttggaagttcttgtgtgctggagatgtggctggggttcgtctcacagtggaggcaaggaattgcaacttttttctattattgtacaccttgaaggcgaggttaattaaatcctgttgtggggtttgagggccagaatttaatttttggagttttatttaatgtcgggagcagattgggtaataaaatgtatattgagtataagacagccttttgactttttagggtctagggctgtaaagcttctcagggttgatgccgagcgaccatgaactgggctggatttttatatttgatgaaaaacagcctaaacgctatctgatttgggataaagaaaaaggagcattaaccttgactatgcctttagctctagccacctttttaagagtaaattgctggtcaggttggggagggctagtcatggaacgaaactgtaagccggactgggtgtaaggaggggaggtgataaaaggattatagggtggaggagcggaggctgaggaagaattgggacctagcttggcctggcgaggagcagtctggggaggaggggagaggtcagatgggtctgtagaaaaggaaggttagaaagactcagccacgcttggacgcttggggttgagactgaggggacaggtgggagggaaagaaggaagatttgggacgagttgcactgggcacagagactaggaagggaccgatgtgtaaaagaatgcctagacgtcaggcacctcagaccgtttgcctattttatgacaagaattatttagatcttgcaggatgaaaaaattgaaagtgctgttttctggctatttggaactactgttgagtttgtattgtggtcaagcggtattgcagaagaaaataagacacttagattttaggtcaagtgagagttgaagaggttttaagttcttaaaaacacaggctaagggagaagaaggaatggagggtggaaggttgcccatagtgaaggaagcaagcccagagaaaagagagagtagagacacggagggaaggggttcaggggttcttaccctccagaaaagtgggaaagaggttggggcatggaaataagggattggggcacagagatataagaggtcagggtgtggaaataagggattggggtgcagagataagaggtcggggcacagaaataaggtattggggcacagagatacgaggttgggatatttgcccctcccccagaaaagtgggacttgctgctaagggtgaaggagaagaggttgggggtttcttgccccccagaaaggcagagaaggggtgaataatcagagaggcgtccctgcaatgattaaacaccaagggaaggctccttcccagtccgtgactggcgccagagttttgggtccacggatgaaacatgtctcctttgtctttaccagaaaatgaaaggaattgaaattaagagaagggagagattgaagagtggaaaggagaaagtggttgagggatagtgagaaaggttggagaagagagtaagaagaggttgcttacccaatttaaaattggtgagatgtcccttgggctggtgggtctgaggacctgaggtcgtaggtggatctttttcacagagcaaagaacaggaggacaggggattgatctcccaagggaggtcccccgatccgagtcacggcaccaaatttcatgtgcgtccatgtgaagagaccaccaaacaggctttgtgtgagcaacatggctgtttatttcacctgggtgcaagtgggctgagtccgaaaagagagtcagcgaagggagataggggtggggccgttttataggatttgggtaggtaaaggaaaattacagtcaaaggggggttgttctctggaggccagagtgggggtcacaaggtactcagtgggggagcttttgagccaggatgagccaggagaaggaatttcacaagacaatgtcatcagttaaggcaggaacaggccattttcacttctttcatggtggaatgtcagcagttaaggcaggaaccggccatctggatgtgtacgtgcaggtcacaggggatatgatggcttagcttgggctcagaggcctgacagtgacgacatagcagtcagatttcccaaaccagaaatctgacctaacaaactacttttttggtgtgaattagcttatcttaaaaacttagaaaacatttcaattgtacctaggttctgaaaatcttgtctgtgtggttatgataagcataggtgaggtgctggttgagtatgtggcattcataaatttcagtcttcaagacatatatgtatgtctctatctctgtgtacagttatgattttatttctataattcagtttaatatctgactttactcccatgcaacttagtagtaagtaaatcacagtcactttgggggtccccccacctctactaattatgtaaaagcttctggggtcttacctagttccttagcatctggagtgtggccacccaggatgctttctttctctgtgcaaagggataactattgagacaacccttccacattcagtgggtatcctcagtgcttctacatcacacttgggcaactgaaatctttacaaggttttctgtggccctgcctgaatacagacaccaaagtctttctttttgctctggtcttgcccccgacctgggactctaccttgaaaacaggggtcagggcccctccttcagagagcttgcacatttctacttccttttatccttattccatcaggcagggaattctgaattagggaagtggaagactccatacttcctatttctcccaacattatatctgagggaacagagtcttccttctctgttccctcagtcactctgtccagaagatttttttgtttttttttctgcctcctgaccagtcacattctgttttacagagaaatctattttatagttaaattctgattttataatttaattgagtgtactagttcgttttcatgctgctgataaagacatacccgagactgtgtaatttgtaaagaaaaagaggtttaatggacttacagttgcatgtggctggggaggcctcacaatcatggcagaaggcaaaaggcacatcttacatggtagcacacaagacagaaatgagagccaagggaaaggggaaaccccttatggaaccattagatctcatgagacgtattcactaccatgagaacagaagggggaaactgcccccatgattcaattatctcccaccgggtccctcccacaacatgtgggaattatgggaactacaattcaagatgagatttaggtggggacatagccaaaccatatcactgagaagcatttagataaaaattaaatgcagaaaacatatagggtcggtagcagggaaggacggaagaaataaaataggttagtatgacaatcagattgatctcagtacccattgaacaaatcctgagcattgtaggagtttagaagaggaagctctaagggcttcaatgtaaacccttacttggttcctcaagagaattgtccaaactatgaaaggagaagaaggaaaaacaaatcaatataatgaagagagtcacaaaggaacaacataattatggctgaaaagttccaaaagcccagttcaaactggaaaacctgaaattatactagactctttcagtgtgttcagtgacatctctcggaaacatcttagagatatgagaagtattagagacataagatgataagatttatccagaagtgggaactgggatagccatatagaagaggactggggatgtgaagaaccctatgtgacccagggagtatggctttgtaatggatgatcaaatttcattgatgagggaaatgaaactattgaaaatatctgggaataagaaggtaccaagagactggacattgtgtagcggcataggagtgattgcattgatgtgacaagtggaagaggtgggaagtaaccagtttgtggtcagagagtgcaggatttagatttagaatcttggaaatcattctgaagattatgaagtagtaggtgtaactatgctgaatgttgaataaatgaagtagaggtgaagggcattgcatttgaggaagttaaagtaaagccagattcagagatgagtcattattgaggatgttagagttgccaaaaagggattatgattgaaaagaaaactgagccaatgctgaagtcatagaggagagaagcagtgtgaccggagatgtgatgggggcatgcgttaactaggttggggcatatcttcttttaaataatggattgatattaactatggctattttttctccatctatgatataaatatatatcacaaaaaatttgaaaaatatatgtaacaaaaattaaatcctctatatgcactcactcagaaaaacattgttaacatttggtttaccactatctcctgttttgtttttattttttttattgtttctttcttttacaatgaagcactggtactttaaaattatgttttggcattcagacaggtacagctttgcctttttctcgtatttaatggtaaatctcctttgtcttacaactatagacccctacattggcccaacaattatattcattatattcttggagactttaaaacatgtttagacattactatatttctgagaaaaaaaaatggcagcctgggtagagggcatggggatatccttctggtcttgctcattcatttacaacaagtaaaattatgcgagttagtcatcacaccattcctggagatatcctgctgaacatgataaaaaatatttatctgaactcaagaagtttacattctcctgggaaggatataatatcaagatataaatgaaaaggcaatattgaacttgttttagtaattatgatatggaactaaacaaggtgatataacaagaacctggggatgatggtggccatattgttcaattatcaagaaagaccactcatagaaggatgaagctgaagcataagaaagagcaatccaagtacaaagagagagaaaatagatttcagtcagaaggagcagcacctgcaaaggcccagaagtgtgaacttgttgtgttagaagaacagaataatgtctagtctagtgtatgaaaaaaatagggagaatgttacatcaaataggatctcattgaccattattagatttcgttctaagagcagaagaagggtactacagggtgttactctgaagaatcaaaagatcactcatggtaaatggtcttgttttcttcattgggaaaattgaagtagttagaggataatgcccatagactctgctaccatctacccacctaccagtattggcacccacatagtctgcatcccctcccattactatagattgtctctgttccaagttcaactctttcacttttgaactagattctcctctttcacatattcaaggacaaaactccagcaatttttttctctttcatccacttcatagttttcccttcactagtgggtcatcccatcacatacaacaaatttttctctcatttaaattactttaaaaatcttctcttgattctacttaccttttatctattgctacatttatctgttctcctttaccacaaaactttttgaaaatgttcttttattcactgtttctaattcctcttctatttccttataagcccacttaagtcaggctttagtgctgacaagttcactgaaacttcaattgtgcaattactgatgactgccatattgttatacccgatggccgatttttaattctcatcttatttcacctttaactcttaaaaattacttcctttgactttcaagacaccataatctcaatgttttcctcataccttactggtcactctctgtctccttggttgatttctcctttactcattggcctcatatgttggtatcccagggttttctcttttatatctattctcactccgtttgcactcctagccatctatatgatgatgacttaccaaattatatatctcaagccatgaactcttcctgtaattccaaacttctgttcaaatatcctgacaatctcctcttggttatctaactaacatagcaaatgtctaattgacattcattatatgaattcttatcttcccctccatgccttcctcaaccaataaaatggttactttatccttccctttgctcaggtcaaaagccttggagtcaactctgggtcttctctttcatactctacctacaatgcactgggaaatcctgttagctttgcctttaaaacatattcagaatttaaccatttcttacttgattattactggcccccacttacttgatattacaaatagcctcttcagtgagatgtattcttatgctcttgctcactaccatctatacgtctggcagccaggatgatactcatgaagtccatgtttgattgcatgacagctctgttcaaaatccttagtgtcttcctaagtagaacctcttagattaaaaaccaaaattcttacaaagacctacaaggcctgcatgaactgacccctcattaaatctctaatatcatctctaacttacttcttcctaatttgttctgctccagccacctcagcctccctgctagtcctcaagagtgtcaggcatgtccctccttccacagctttgctctgcttgttccctctcttggaatggtccaacccaaaaattcccataacttttacactcatccccacttcaggtctttgctcaaaatgccaccttcccaatgaggcctctgctgactcttaactattaaaattacccagaacttctaattctccttcctctgttctgtgttttctgcagcagttttcatgtaatgcagcatgaacatcttaaactccgttacacattcactttaaagacatgctatcttctaaaatgcaacacctttcttacccataaacttcataataccttggataatctagaggcaaaccctaactagggatggaggatttgacaagctcaactaaactatttctatttcaatcctggctcactagccattctaaccctctcaagcaacatgagaggtatacttgttctaagtatactcacttcccatcctgaccgccccctgccccagtcccagttgttatagaaacggacacttcccactccatggaagaatccgggcacggataacaaatcctgaactaattgcttcaggaagctccttccatctgaggcggatattctgggtgggtttagggcttaggtgatcatagtcaccttcaacgcatgcagtttataggggaaaggtgagtggggcactctgtgataagcagacactgcgatatgtgataatatgatgatgcattcttgagatacctaagtcctaccttgagatacctaagttccagatatgcaagtctgtaccatggaaacatacgcaagcaagcatcgggcctttttgaatggagtaacttcttcaccacctacaagttgggtagctaaatccccaccccagcaaagtagaatgtaagaaagaaggaaaacctatcccactccaaagagttcactggccaaagaattttgtagcatccaatctcggttgcggctgaccaagacaatctgatatggctattatatatttcaaggtcacgtggatttggccacatggaatataatttctggctggagcatgttctttcagaaagttggatgtgttctcagttgaaacactataggttttctccaattgcactgaattacccatcaggaattcctctaagcttggtgacctccttggttttgctcctgcaacgggacttagagtcaaatccccagcttctctttttcagggaggacaaggaattcagacagatgagaacaatgagagagagaaaggtcaccagagagcgaagatgaagagaacagaggaatggcagatacaatatgttagcatataaacacattataattttggccaagattggccctgtcggtaggagtttttctttgcataaagttttctctcagtaaataatagtctactctctcggtagcatctgaggccactgctgtaatgattttttaacttcataagtttcctagaacgttggtccaaatgaaggcaccccagttatgtctcagtcgtgtacctatagtgcgactgttgctgccatctctcagcagtccctggcaatgccacactgcttcaccatcagcttcaaagtgtccttgaagtatatattctgactacattgaatgggagtgccccatctcaacttgcaaccattggattcctgtaggatagaatttgtaaagaaaacaaggtttaatcaaaagcattaagagtctcttcttgttgacaactttttgttctaaggtaaccatatttactgtaaattatttttttaatctctcttctagtgacctacatgtttaaccaattgattgtactttgcatgaaaatcaaagtgttctttccccagtttacttttgttatcagtgcaatgcaaaatctgtttgcctgaattaggttgcatttcattaatctcttcaatatgaaattgtggtggctcatggttaatgagatttaagaatctgtgttacttaaattgtgactaacttattttaaaagtatgtcagaaaataatgattgtttctagtagtgttaaagtattaatgattagtaagtcttggtacacctgactgaactttggttagattaccaagtgtaatgaagtgttcaggatatttcagaattgagttagtatattacagattagtttaatctaatacaagagaatgtggtatctattagaaagacagacaatataaaataccagggaagttcaggggagggagagattctttcagcctagggcactaccctagtctcatggtcatctttcagacctagctcgtttcattcattaattattcattcattcaaacacacatattcaaaacctacaatgtgccaggtattgtgctacatactaaggatgcaaaatgaatatattaccattcctgctcttaaggtatttagtgtatcatatagtcatgacacagtgtttttaagtgttaagctaaaagtatgtacaaagagaaagagaagaggctaatagctccatcttgtgctggggtgacagcaaggagtgttagggacatcacaaggaagaaacaggcatctgcactgcacctcgacaatttgaaggtcaaataatagtcaggtggtggacaggagaagaatggaatctgacaaacggaattacaagctcaaagtcattgttacaagctatgtattggcatttcaaaggcaactcctgttgtcttcaaatatgctttaaaataatttaaacatctcatttatttttaaacagagccattgaactaagactaaacttagcaaatgatttacctggtcacagacgttcaagaaaacagtaaaactgttaaaatgaaaaagtcaaaacaagagtttgattgacacttgtctatttaaacataaccaaagtatatttaagggatgaagcatcctatatgttattgctattgatttttatggctatttattcatattttaagccttatcttaacaattctctgagataggactatagtggaggagtgaaatctcctcaataagaagtataatgctgagtaaattcttgtttctccctatcccctagatttagcagtatttacaccccaccagtttctactaagtgcatgcacacatgtgggctgtacaaacagttcctgggtcctactgtacacagcacagctgccaccagaacacgtggattccccagttctgactgtcctggattctagaactatacacatacagtaagtagaaatgttgtctctctcacatgctggttcatgcaagaatctcagtgagttcaatcaggggaggagcttgtgacataaaattaattttattgtgattaaatgcatagaagtgattagttcagtggatctgggaacctttgattatcacttgccagcctaatttccattttgtctttatgcaatcaggctgagctacataggtacacagattccatgcaaacttcaataaacaaaaaactgaccactttcatgactgccttgaatattttatgtttggggcattatttgtaataatttggaattagaaagtatgtatatctttttgagtatagtccaggaccttcttattcccttattacctgcagttgatgtcagaaaggaagtttcacatataggcatgttctgatgatttctggtattactgattcttgtccatttcctgatacctgaggtataaggtgtactattgtgctgagctaaaatctaataggtctctcttatcaagagttaatacttgttcatatttatctcttctggactcagttttcttatctgtaaaataagagtttagactaaatgaattctgacatttattcaagccgaaaaatattatgattcagatctcattgttccatgtctaaattctcctgttggcttcattgtgcccctaagccaagccacgttacttagccaaaaagatttcccacgactcaggtgtttctcagcttaacaatttcctgtctgttctatgacttgcccttctcatttccactgctaagttgtaaccctcatctgaaatgccctctgttcttccttctacctatccaaatccaatccatctgttaagaataaaatcttatgtatctaagtagtgtgtcacttcattcaagaagtcctgcctgattttttcagcccttccagtcatcaatttcactgttttctctaattacatattaaccctgtgttggattcctggattttccaggacaattatattattccctcttttccccatatctaagttctcagaagttctgcttctgaagtttttgttctacagcttaaattcaaaataaatactcgcttatacatttttgtattgttagctaattaaaattacaggtaaccagatggcaggagccatatcacatttcctttttgcccctcagaataggcattggataactacttcagtgttttattttaaatgaatcaattttgagatttatgttttttaaaaaagtgtcacaaatccaagttcaaatgtgtcctttgaaaatcctgtatattttagttttgacttgaatgaatgataataatgtattttaccattcccaggtggaaacaaccaagaaaaataagtgggattctggaacgctatgtattatatatgtcaaaccatacacatgattttacaatttggagtgtcatctataacagtacagaacttttccaggatcatatgctacaatacgttttacctggtaataaatatctcatcaagctgggagtaagtttatttccatcactttctctgtccccattccttccacttcttctccccttcccgtggtccatcttttctttctctctcacttaaaaaaaaaaaagtcaaaatcttcatgtattgctgtttatactgaaaactctcttcccatcctaaatgtgaattctggtgatctaatacctacacatttattttatattatgcaaatgatagaataacaccctgagtcagtagattttcccaagtcaaagttgggattatcaagattttcaaaattacttgtagaacatcataattgttaagaactttttctaaagtgctaggattcataaggttatttccctgtggcatttgtattcatttaaaaaacaatgcacagtatgaaaatttagatcttatatttttaaatggaagtttaaatgaccgtcaaatattcttgattgttattacattctggtttatattatgctcctatctcagaagaacagtcacttaataaaaccccagaatcaacatagtttagaggttcccttagacaaacaatagcattttttaaatgcaaaaatagcacttttacacaaaggtcttttaaaagaccttgatattactgtggaatttatactcagtaattccttttgttttttgatgaaatataatcttttttaagtttaatagcacgtctgaaaataactgaatataaacatgagattgtccctatttgttttaaacacactcttcattttatagcaatacctatataaggatatttgctttgataaatgccatagaaaatattctgctcttgattatgaataaatttacatttatgtagacactgtgtatgcattcattttacttaacatgctcttgaatgctctaaatattataccatgagaaaataaactacactcaactattgctaactgtctgacttaacaccacaaaacaagggcaatcagacagtggttaaaaaaatactgttcaaaactgactccatgtgcctaggtgttctgcacagcagtttatgaaacagcactttggttatgtacagttttattacccattaagtaagaaatatactaacttgattttcaaatgctaacacagaaatacaaactattttcaaaataatggtagtatcaaaattaggaagagtcttaattttttggaagcaaccaaaactaaaccaaaaattgtgctcttggttgtttatcagaagtaggcaaatgacatagaacagattctcttcctagggccgtttttaggatgtgctgtgcagtcaatcaattcatatcaatctcctagattttataaatctataataccttgaaaaatacatactagtagattaggagtcctctgccctgagtattaattcagattttactacaaactgtgtgacctaaggcaaattcacttaacctcactgagttttattttcttcaagtctaaaattagaacattgaactaaatgatgtttaatgtctctgagccataaaattctatgatgctaaaaaaagtaatcccaaacactattctatggagtcaaatgctatctgtcagccgctgaatagtgttgatgcaagatgttataaagatgtgaaaatccttgccttaactcttggtagggaaataaacttgctcacattattttcaagttcactatatttattagggcagaaaataatatattttcagggaggattcaactaacagggtttttacttaactctgttaagcagtaaattaaatgaaccagaacattttaggttcatcctggttaattgagggattattgtatatttcacagtttcaatataataactggctttcaaggtcattagattagtagatcgagagcaggttctcagcaaagtggagttgcctttatagatcattttagcatgtcgactaagagctggaaaacaaaacataaagataacaaagcctttaagcagcatttggaatagaggaagctacacggggatttgaaccactatgatttaccctaggcttggagcaggtatgttacttcatgtaacgtcatttagttttcacatttgactggattataaactgctgaaacataaggactgaatctttcaaaatttgatctgcagtttcaagcacagggcctattggaaatgggaagctgagcaaacaattcctgaatgaatgatcaccaaggacatcatttcataaaggttctaagacttttgatatgaattaaataatttgcttggaaacactggaattaggaatggtgtggttccaaaacatactctttccactgcaaaaaaaaaaaaaaaaaaaaaaaaaaaaaaaaaaacataatatgttgctactctcaacaaaggctattttgaaatgtgataaaatgtgatagctcctaataaagaagacaatatgttaaaaataaaataaagaagctattaatacagacagctatcaagacaggtgttgcttgataattttcataccactgctagccatttgtaacttgatgaattctaagtattatatattcctgaaagattcctggaagtggcttcactttttaagtaattatggatcaagtggcctttttctttttcttcgtgctttaaaatatgttgcactcttaacatccccaatccctgtggacctgaaaacttactggaaaagagaatgctagttttggtccgggcacactggcttacatctgtagtctcagcactttgggaggcccaggtgggcagaccagttgaggccaggagttcaagaccagcctggccaacatggcgaaaacccatctctacttaaaatacaaagaatagccgggtgtggtgctgcaagcatataatcccagctactcgggaggctgaggtacgataatcccttgaacccgagaggcagaggttgcagtgatctgagatctgccactgcactccagcctgggcaatacagcaagactccatctcaacaacaacaaaaaaagagaatgctagttttggattgtcttaatagtcatgatttcaaaaataattgataaaattttattatttatgcattttattgtaccaaaattgaatcccttatttggccagatgttactcatcatttcaaggcagagttatgcctttatgaatttttcaaaatggctgtaactgagaaaagctataggcgatggttaaaacaacttattttaatggctctcaggctttcaaagaccttgctatttcataaaggcatttttaatcaaccccactattttgtttagtttttccagaccagaattttaatcagcattcagctgtattgaatgtagtggcctctggtgcgggcaggtcaaacaagatactgattggttcaatttcatttagatgatgtcagattagaccaattggaagcagctttaagaacatttattttcccatcaaaggaactaagataatgtcctgcttacttaggaccctctaaatgcatccaaaaagaatgtgggcaaaacaaaataaaataatttgcaggtaattctgttatttcagcagcctctttataaataatttcatttacaagaaaaatgctttcataaatgccttacattcttaagagatttctttgtcaagttactggtttatggatctcagatgacatagtagatgaaacagtccttctaaaccaaaggatgcttttacttatcctagaagacatcataaaatcctcaaagtaaattttaattcacactgtgttttaaaaatatatacttatatgttgtatagtatagaatttatttggggagagttagcaggggaaatattttagtatacaaataagaaaaaaatagtgacaagtagactatcagaattaaatcccagtgtgttacaagtttaacaataagaagctgcaacatttttcccttctaaggaaaaaaaatctgaaaaatgcaaatggatggattttttttctccctgagaagtgggaaaaatttgtctttgaccatttttcctttgataactcagctgtctcatatggcctcttttcctgccatattttctggtggacttttagcacatttgaaatgtctggggtcttcaactttttttctattttaatcgttgggcaattattttttgagctcacagtgacctgtcctaaagctttgagtcagagtttggccacatttgcaaagattccattctctagaggagtatggtttttttcttgcacagaaaggcacatgccacagctgagaattagaggaaacccacagaggttaattaggtacccaatcttaatgcaattttcatgctcaggccacaatttaacccatctgaaagttgcttaattaagctggtaagaaattatcctgaagacatgggctattgctatagtcttgtaatagcaagtgagattaatttccatgtttgttgaccataaactgttgtttatgcttataatgaagaatttgcaactagttgcaacaactttgcaaatagtagtgtactcccatatttaaaaaaaaaatctaaaaatcagtcagcttccttctgtctttggggaaaagaatatcgactactttaagaatcacaaaatcactcactcagtatcaaactgaaaaatcagagagacgcctaaagaaagagatgctttaattttttatcttagtaatatctgtcttacacaaaaatgagctaaatatctctgcttttttacattgtcttatgattttgctttattttctttttgattttggtaaaatttagtgccttttgaaagatttttaaactttgttgtatcaattgaaattgtaacttgaagagatactgaaccaagcttaagtatagttttcaaatatcattgttatataaggatataattactaatatttgctagcaaatatgggctgaaaaccccttaatgtatttatcaatttcctggagaagtgcttgtccagtaagtttaaaacattatttgcagtttattatgaaattgcacacggaagtttctgtaacattcatgttaccatttctgacattagtgatacttaattagggaacagagagttctgtgatcatgttaaatttgtcaaacatgttttaatgaagcctatctactctgacacataagtaaattatgtgatcctttaagccattaaacattcactcaaaaattgctttgtatttgttgttttatgagaaacattgttttatttaattttatttggtgttatgctataaacatattggtcacactgtagaaataaaaggcaattgtatttgctgcacatcttttcttccctagaagtcagttgttttgtcttaaagtagtcttcatcctctagtactttacttatgttatgtgtacacatgctgtgtgtgtgtgtgtgtgtgtgtgtgtgtgtttaattcactctgggaacctttgtgcaaggctaacttcagcagggctgtttatccagtcaatatatgccctacatctctaggctctgacttaagatgcttccttaattcatacattcataccatctcagttattctctaactattggggatggctatcttatgtcttaaaaagcaaattaaataaatgttaaatcttaacactgaaatgaatttattttggggaagtaaaggtagcactatataacaaaatctgaaactcttattatgaattctctttcctcaatgttcatgaaaacttttgggaccaagagtgaaatgagcatttttgcatctctgtttaggcttgcacaggtggtgggtgcacagtgagtgaggccagtgaggccctaactgacgaggacatacccgaaggcgtgccagcccccaaagcccactcatattcacctgactcctttaatgtctcctggactgagcctgaatatccgaatggtaagtgaactcttttagcctcaagttaaaaagatgattagcaaaggtaaattaatattctaaatggcagcttatatgtggtgcttaatttttaatgatcattttagcacataaaatacctaagatagtatcattgtctctagttggggagattgtggtttttaggctaacacacaattttggtggctcaaaagtgctcccttttgatagtttttgtgtactgcatctcattgtttaatatgctccaggagaggtgaagagagcaaacggggaggattcccaaagaatgccgtagtgagagtgacattgtattttcaatgactttctgtttttaaaagccattagttcttccttggcgaaggagagaggtggaaagttcatgtacatattgtgtcaaaacgcttttgatttaataagtttatcttaaaagaggccacttggaactctgtattttttaatatactatttataaatatttcaacatgctgtttttaaacaatgcatagattaaacatacatatatttatacatatttagctggaggcaagttttgtgcatttctaagcaatatatatgtttttgtacagtttagtgaattaagctagtcagttacgtttcactaaaataaaatctcattatgaagaatttgtaatagttttgggtagaaattgctttattcatttagtggaaatatctttaaggttcatataacatagtaccattgtttcacactgatggaagcttacttgacattaaatttcattcctctttgagacaaatatcaagaagacttttaatatagaaactcttttaagaaactcattactgaaaattgaaatgggctcttttagcacagccaaaaagaatgaaagaaaaaagttacagttttattagtttgtcttatgtttactatgatattaattattccagccatctcattttaattaaacttttggcaaatgcactagatatatttgaggtaatggagagaattctaataatcagagtgaattattatctctgctattgaagttattcctgtactattacaaattttccaagaaaaaataaatggatgcctatttgataccatattaagcaatcaacaatcttgttatgcttcttacttcacaaagtaccctagttcatagatgacaatgaaaatgttaatgatttatttcaattggattgctgtgaaatgctgttacatgatttgcatagtagagcacttcccttcatcccaattggttaatacaactagaactacaattgctctcagaatcttcagctgttcagggaaacattttccacattacaaagctctttgaatgttttgtgtatttgcgtatgttttgtatatttgcaagcagttttaaaatgtactcatcaagcaagaagaatttgggagattttggagatttgtattgacacttccatggtattccaaagtcttgtgtttaattagagtgggatttttagaactttaattgtggtacaatggttagacatttaaaaggcagttttattttttttaaaacgactttttttgtttttactacttctccccactttcccccaattttttagctttttgtttctcttgttgattgtctagagagggataatctgattgttggaaaacatcttgtctctccatctgtcttcgaagtccccacacctctcctcaaatacccaaagaataaagtctaaattttttagtctggtattcaggttactaccaacttgtgactcaacctgaatacacattgccttataacatatcttcctttctagccatgctggaatatttatggcttaatgttgggttggaaaacatgggtggagtcaaataggcctagagtcaaaaattgtttctgatgtatagtgactgtgttacctcaggaaattcattaacttccatggaccccaatttccttgattagaaaattgagattaacaggctgggcctggtggctcacgcctgtaatcccagcactttgggaggctgaggggggtggatcatgaggtcaggagatcgagaccatcctggctaacacagcgaaactccgtctctactaaaaatacaaaaaattagccgggcatagtggcaggtgcctgtagtcccagctactcaggagggtgaggcaggagaatggcataaacctgggaggcggagcttgcggtgagccgagatcacaccactgcactccagcctgggtgacagagtgagactccatctcaaaaaaaaaaaaaaaaaaaggaaaattaagattaacaatccctgtcatcaccctgtccttacctgtagaaatacaactcattcttctaggctaaccgtaggcctcttattccatgaaatcattctactcttccttaagtttaaagtaaactttccctcttctcttgactatgtgaactgtttctatgccttcataatggaacttcattcagcctgtgcttaaagttatttgcgtatatgtcaaacactcccaccagatgctaaggaccataaatcattaatttctctttcactccgcagagcctaacacaatgttctactttttattggtacgcaataatatttaattcatttaatgtttcttgtggaaattacctttgatcagtggcatatatactccaaagccctggctctttaatgataccaagagagatgatagaagtacttaccatccagtgtctgcaatatatttgttcaaaatgcatttgttcctaaaatatatttttctagctgtgtagattctgaggctgggtttctcttttgagaataccgatcttgcatttgaccaaagaatttttaattttcttttctggattatgcccaattcaaagttaatggtaccaggctcacatggcaatatatgctacctaatggttgctttctaatttctgaatatgctgctgaagagaaatacaattggagaataagatagacttcattcttgtgtaactaaataaaccctttcaaaagattttaaatggtatttctcaaacttatctgattcttagaacaatcttgggagcaccaattgaataagtagattctaggctccaccacagacctcctaaataatcagaatcttccactgcctcggttatcatcaaaatacccctgggtatttactacattttccaactgagacctctcacaaaatcctccccctggatttttgttacatcttaaacccagcatatccaagttgatttctcctcatggtctccatctctctgcttgctctttctcctgtattccctctctcatggatttgcaccacccagccctgccagccagtatactgggcagcagtcttcaccttaaaccttgctcacccctgactgctgtcaccacacaacccctcgactgcacttctctagtgaaggccattaatattgctcacccagatcgcttcaggagcctcctcatgccatgcaaaaaatttgcatttgttcattcaaaatatgtattttgatgacctactaggttccttcactcttatctatacagtgcatttccttgcttcttgatctcaaggatatcagagtcctcggggaaaatatccatataaatgaattctcacaaggtggggaggtgcacaaggtgccaggtacacagagaagcagctcctagtggttccctatgagatgtggacatgtcatccctctgcatcctcacgaagatgttgcaggaccagatatagacatgtgtttagtctgaaacaggtattacttgcctggttttgcacactcaggtttcaaaatcttgactctgttaatcagttatgtacctaaaggtatgtttgttcactagggatttataaacatgaacaaagacttgttgagaaaaattaaactcaatttctataatgagaactaggtatatttttatgcttgcctatatatgacaaaatatgaaaggtataaaaagttctaatataaatgtccagtccttgccaatcaaacaattggtagcctttggccagcgtggcttaggaaacattctgtccttgtcataactgattctgacttaaatgatcatctcctactcgtgaaagtctgatggtaatccttaaccaatgctttaagaaaagatcctctccccttgttatttcagttctcttccttgtctcccagcctggtcctgctccacagtgtctgtgctggaaagcttgctagttggttcagtacatacttcatgagccctgagaatttttcctaatttggtgtcttttgttcagcagtgtaccagcagctccaagaatagtgcctgagacataataattgctcagttaaaaaattgttgattaccattattaaagaaaaaaacagaaaacaacatgttctggaaaggatgtggagaaactggaacccttaaatactgttggtgggaatattaaatggtgcatctgctatgaaaagtagtgtagaggttcctcaaataattaataatagaattattagatgatgtagcaatcccacttcttgaaatatatccaaaagaattggaaacaagatgcattgcagcattattcacggtagctacgaggtgcaaacaacctaagtgtctatggacagataagtagataagcaaaatgtgatatatttacacaatggcatatcactcggccttaaaaagaaggaagtcctgtcatacaatatgctctggatgaaacttgaggagattatggtaaatgaaataagccactcacaaaaagacaaatactgcatgattgcacttacgtgagtttatctatagtagttgaatgcacagaaacagaaattagaattacggttaccaaggtctgggtggaagggggaaatggagagttgctgttcaatgggtttagagcttcagttttccaagacgaaaaagttctacaactctgttgcacaaccacgtgtatgtagataacacaatggtacacttaaaatggttaagatgcccaattttacgttgtgctttttactgtaataaaaaaaagatacagagaggatgtaataaaatgctataaactaaactagaaaaaaagattaagaacagtgttagtttaaaacaaaaaaaaattgctgattaataatcacatagagatctatgcatgaagtatgcattttttaaacaagggtgagctcatactatttgagttgttgtggaatttacttttctcacttcacaatatggtgcaaacatctttccttgcagttcagtggaacgtgacctcattctttcaaaaggcagtatgcaatcccactgaatgaaactacagcttacaagacccatctttttattgatggacatttctgtggtttttgctattacaaacaaggttacttgctattaattgcctcagtctgccaagtacagtctttaagtactgagtcattatcacttgattcacacctaaggctttgcttgccttcaaatatgtcctgcttaattctagtcccttgcttcacatacctgcaaaaatgatggtgtgacactccagctctgtttctctaatcagagtcctttgcacccacgttccctctggcaaaggtgttctttacaggctgtgatttcagacatgattttaaaaccgctgaaaagagcgacttttaggtccaaggtctataggaacccttattatgtaggaccttgacgcttcctttgtaagaccattagctatcacagagaagtagcacaaaggattactgtctaatacatttgtgacctgtattgtgtagattgcaattgcgtaattaaagttctgcttttgagagcttccaaattctcatgagccatattcctttttagaagcttaggccttagaatcctgaaatatgttttttcttcacacttcaagtctaccttgctaaaacagcatagctatctgactatgccaaacttattcgtcattatctagcataacatttacagtgacattttaaactaattagaatatgtgttttttttaaatactaactaaaaatatagaatataaaatgtttatcttttattaatagctataattccttgtaactaacctctatctttacctaagtaaatcgacctaaaatagtttctttattagactgagccccatgagggcaggaatcatatgtatctttttcactgccctagtcctggcctttggcagagtgccacggagtagaggcatcttataaagctgtcgaatgaattaatatttaccgatgatagggacaataccaaaattgtaatagtgttgatgtgagaagcatattcatatgcaatcatacaacatacacaaatgcacactgtgagcacatttgatgattatgtaatataggtgggatgatttcaaagacagcagagaggaatcttcctcttggcctgctgaaggcttaaagcacacacttagagacctagtccttttgcttaagatttcatcagcctggtaatctgtagatttcctaatgaaagacagcacatagacttgtcttgtttgtgctctgcatgtctcagtatgaaaggatatgtttttactgtggtcaggatttgttaataaccacatgggcataattaagagagaagcatgtggctgggcgtggtggctcacccctgtaatcccagcaatttgggaggtcgaggtgggcaaatcacctgagcctgggagttcaagaccagcctaggaaacatgatgaaaccctgtctctaccaaaaaaaaaaaaaaaagaaaaagaaaaaagaaaaaaaaaattagccaggcgtggtagtgtgtgcctgtagtcccagctacttgggaggctggggcatgagaatcgcttgaacgtgggaggcagggtttgcagtgaaccacaattgtgacactgcacttcagcctgggtgacagagtgagaccacgtctaaaacaaaaaagagagagagggagaagcatgagagctgggcacccattagacatggtctagcatcttcttgagaagtgaaggggacctgagaagcttatggaaatattttcctaatttagtctttcatattggcccatctttgtgagaatttatatgtgaacatatgtcaaaatggtggcaatcatgtcaaaaataatagaaacatcttagcaggttgattatttttgtagacttacacgtagtaccttgaagacaatagaacgttatttaaaaaaaacatttggctcagtgttttgagcttatatattctgtcaataatgggtggtagagaaatcaattaactataggtctcttatacacactctatacatgttgtccttcacattaagagatgatgctatagaaataagttttcataatgtatgcacatgaagatatatgtataaatacaaattaaatattctatgcatgcatagaaataaatacttgatttcctgttaacaataataacattagtaataataataatagctataatttataagaatttgccaggcactttaattcccataactagcccatgaaataggtattgttatctcacaaatgtggaaacttagatttataagtattaaacagtttaattattcaaaatcaagacagctggttaagcagaaagattgtataaatcaaagcaaggtgtgaatgacaaaaattcacggttttattcactatattatctgcctctactttttgtagaaaggcttataatgtagaatttaatctagctgtatgaaaacaaaattttgttacttttacttgttcaatgtcctgttcttagtgccaatatttaaaattcataagatctgtgttctggtttttctctggttttggagagataactgtttgatatttcatttgattttcttactttttattttaaaataactttatttttaaatggtcaaaatgtgattctattttctttcctggaaatgctcagttttaataagtgaaatggattatagaactcagcgaatcacttaggaaaactgcttgacagttttgagcaaaccttgcgtaacttttatgaaacacctccagtcagtttgtcaggtagaatttcccaagcacagtcttttttagattccgttgattccatttttaggagagcataacagtaataaggcattatcccgcaatgtgaaagctcttctctcttttcctttttaattgaaggatcaagtattcacacagggagatatctgccacattcaatcagcatctggaccttgaggggagccctcagttcatattcctattgccatgctgcactggaaaagacaaacaaatatgtttggagcatctatattcactacacatgttatttttatgacacactaaagcattgttgtttaattcttacagtaaacacaattcttcagcgtaaatagagataccttgtattaaatttacattgtattgtacttgcattgaatttccttggttatatatgacaacctattgagcaccttaggaaatacaatttgacataacatgatgaagaggcacaaagatatatatcccagtggatatgctttatggacaattatcatccagcttccctgtgaaaattaaacaccttaaaaaccctatcattatggaaacagaaaggtgataaacttgaaactccttctgttgtacagccaatgggaattaagtatccattttgtggattatccattgaagaactgaatgtctagaactagattaaattaaactgaattaagccagaacctgaccccctttgccacatggcatgttacagttttattttgcttcagctgtcttactgattattagtgccagagaataagcaagaaaaagcctgaaaaaatacaatatggtacaatataatagagtaagtgattttttatggtgaatatttctcttttgcttttctagattcactctttttcaactctgccccgtgccctgtaaggctgaaccttcctcacagtggcaatgggcttcctctctctctggcttcctgttggtttgtccatgggcagcaacggcaaaagatgagagggtgagaggagcatggagtctcagaactcattctccctggctctctttctgcatggctctggattccagggttgcattcctccagtaaaggctacatttcctatttgaagcctctttctttctccaggttcctgaatttgttctcaccctttcctctaaaaacataaagaagtttactggctcctagccaactagttaaaatggtctaggaatcttagctagtactagctgggaatgctttattgtcactggttgctttcccttaaccctgtccgcatctttgtaaataggagttccactaaaatcttttccatgccatttgagttgtcattggtttcctgttgaaaccctgactcattcctaaattttatttaatccacatttaacacggagaggtgttttttgtgtgtgtgtgtttgtttttttgatgggggggtagtgcgtgaagataaatttaaaatgactttcttcatgctaagagtggcaagaataaataagtaaatgaacaaaatttccattttcttaaactttgtttcaatacaatagacatcttaaaggccaataagaagagccaagctcaaagattctagtggcggcttgcttatctaataaacccatcatatttaatttttcaaataataatcaacttattgatatatctttgaaagcttttcacttattgttataaaatatttctttgttatcattagtgaaataatggcttatgacatcttcctcttgatgaagtagctctgagtgccaagtttagcttataggtcagtttcggccaggcgtggtggctcaagcctgtaattccagcactttgggaggctgaggcgtgtgtatcacctggggtcaggagttcatcaggagttcaagaccagcctggccaacatggcgaaaccccgtctctactaaaaatacaaaaattatctgggcatggtggcaggtgcctgtaatcccagctactctggaggctaaggcaggagaatcacttgaacctgggaggcggaggttccagtgagccgagagtgtgccattgcactccagcctgggcaacaagaacaaaactccatctcaataaataaataaataaaattaaataaaaatcaaggtcagtttctcagataagccctattacgtatcctacccagactaggttagcatccacctctcccttctctatcccatgttttccttctatccatctgatttttaaaaagtaaactttacatcctcataatacctctaatgtctgttctttcgcttagattgaaagttttgtgaaggaagtaaccatgactgttctgacaacttctgtattaccagcatgcaacacaatgtctggctcatagtagctaccccatagttactgatgagccagatgactaccagaaaccaaatctaaatccagcagacttacaaaaattattttacagtatttagtaaatacttgtttctttgcactttctggacttcattggaaaggaatgaattttaaatgaaaagatagcatacaaatataagaaactattggctaatgacagatagtgtgccacggaggaatacagacctgcctaagcttgtttttgagagatgttagtttagtttttacaagagaagtgcagcacatgacataggtcagaattggaggagatagtctaaggtgagcttcctatagcaagtaaaactttaactcatactagaagcaaggggacagttctgtgtgtgtcccttctatgtgcacagtgcttattactaaagcacattcatatatgctcacttgtttgattctcagatcaactgtcaggccaccagggcaaggaatattaccccattttgttggtcaagaaatgaaagcttagtgagttttgctatctaaccaagttttaaaggtacgtggtcatgacagaagggctgaagtggttggaggaagatccctgaaaaagaagacaattggcttggaagcttttgactttgttttgaaatagttcccagaacaggagacgcactcaagaactaatttgttgattgaatgattacttacgtaaatgtatatgcacaaaattgatacttcaaaataattggccatacaatttatcctgttctgcaacttgctttttttctctaattcacatggagtaaacatctttttatgtcaatagcatagtgctccctcatttttcctcaaagcttagtaaaatgccattgaatgaaaccacaacatttatagaggctatctggtaaatgattaatatccattccttgctacagctacatctcattaatgccagctaaccattaattataaaagatgttgacaataaggtttggtgcttggactagtagatagtcctcaaatggattctcatttatttggatttggtatactccttgaggtagtgttgcaaggagtgtttagccaatagttatatcctgaggagtcctcaaggcctgaggagaggaccctgaactagctgttaagcctcctcctctaaaacaaagtcaaacaacagggttgaaagtcaaagaatgaaagagaaaagaaagctgatgtgcctattttaatatcagacaagactttacagtgagtagtattattagttataaaaatgtagtttcataataataaacgagttactaaaattaacatttattttttatcaaaatatactataagggcccacaaagataaataataagagagatgatatttagaacacatgtaaccatcagaaaactgtatccagaatatataaaacatgcctacacatctataacaaactggagttaacatctgaaaagtcatttcacaaaagaagaaaaattaaatgtctgataaacataagaaaatgggccaacttctgtaataatccaaaagtaaaagataatacccaaacaagataccattttttacatctaatactggcaaaaatttcaaagtctgacaataaggtctttttgaggatatagaacaatgagaactcacatggactcacatgtacactagaattgacatactttcaaaaagagatgagcattgtctagtaaaattgaacatatatcaacaattcctctccaggacatttgtcctagaaaatttgtgtatgcgcttcaagacacatatacaaaaatgtgtataattacattgatgtcatagccaaagtataaaaacattctaaatatctatcaagagtagaataaataaataacatttgccctgtaggaatactacacagtaatgaaaatgagtgaagtatggctactctcaaaaacatgtatagaacacatgaatatcatgttacacaaagcaagatgaaaaaattatatatacaacataactctattaatataagttagaaaaccatgagaaacttaattatgttgttaagggatgcatttctcagtagaaaagcaaggacatggttcttcaaaagtcctcatatttatctgtgaggaagggaaagggatccaattatggacaggagatttctggggtgctggcaacattctattttttcaacgtgagtgatggttacatggccttttgcttttaaatttgtcattaaaatagaattgatattgtatatatttttatatgttatgttttattacgtgatttttaaaatgtagaaagaataggtatatggaagccgtaaagttgtatgcactgtagagtctgaatgcttcagtgccgacacatagctctaccacttcctagctgtataacactggccaagttaccaaacctctctaaaagcttttcttgtcatctatttctctcatctaaaatagaacccattccactatcaagagtttttcctgaagattaaatagtacttgattaaaacgctcaatccagtgattattgctttagcataaacttctttggactttaaagtgtttgtgtcttcttacctggcatgctcccctgcacaacagtattttttaatttaaatattttattttgagataattacagattcacaagaaattacaagagacagagattccatgtatctttaattcagtttctcccaatgtcaacatcttctaaaactataatacaatatcacaactaagattttaactctgatataatcaagacacagaacaattccatcacaagacatggtttcttcttatcctcacactgaaaaacaattccctttttaaccaggaacagaagggtaagttagtactttggaagtaggcttttatgagattaacgtcattgttcatgtttgataaaggaacactcttttctgaatagtgattttatcataccatattgcaatctaacacattccatccctaagtgtcacaagttttttttttaattaaaaagaaagtatatataactgctaaagatatttcttctgccacagactactgctgaaatgcagcattcccacatccctgcctcattcacgactacttcctatacattcaggaaaagacgtctttaataattatttttcctgtttgatatttttaaccatctcactgttactacctgcatgggcttccctactccagtctattttacatgtgattctagattattttttctgtatatgactttatcttgtcgctagtcagttcataaaaacactaatggtctcctgtgcatcataaaatcccaactccttgtagtgtcattcaaggccccaaattccctttgaagttttgttttctattagactttatcgagtgatatggtttggctctgtgtccccacccaaatctcaccttgaattgtgaaaatccccatgtgtcatgggagagaccccgtgggaagtaattgaactatggggggcatgtttttcccatgctgttctcctgatagtgaataagtctcatgagatctaatggttttataaaggggagttccctgcaaaagctgtcttacctgctgccatgtaaaacatccctttgctcctcctccaccttctgccatgattaggaggcctccctagccatgtggaactggggagtccattaaatctctttcctttataaattacccagtctcaggtatgtctttattattagcatgagaagggactaatacatccagctacaggaataacaacagattattgatctatttgggatacctttactgaaccttgcactttcttacttctaggcagtggcaaatgtcattttcctcaccagaagcatcttcctgagacataggtatttcacatattacctttcatgggagacttagcttcatcatatgacttattgaagtccccactaccgtatgtggaagacttgactgctctaaaaagcctgtaacacttctttagccagagtgattattccctgctagagggtcctgtacctactgtctactatttaattatgtcatttgtttggcataaagttgttgtggtgcttatgatccttgtttaacccttgaattgttatttaattatacctatgtttaactcttttcttacttccataaaggtagatattattcttattctgttcttacttcccaaaataccaagtatagtactttgcacttgattgactttcaatatatttatattaatctttttattaggcttatcttgattgctttgagaaccagagcatgttcaccagttcttaattcaagtgaaattcctaaaaattttagaagaggaaattagaccagaaacatataacaagagtagtgaccagagtggggtaagatggccagtttccacaactaaatttatatttgtatggccctgtaaaatgggttagcccctctaagaatccattccctcctctttacagcaatgacaacaacaattcttattttttggagttgtcagtgttaaagaaaataatgcataaaagcatgtaccctattgtctgtctcaaagtaagtgatcagaacattttaattttcttttttaagaaaggctctcactttgtcacccaggctggagtgcagtggtgcaatcatggcccactgcagcctcgacctcctgggcctgagtgattctgccacgtcagcctctcaaatagccaggaccacaggcacatgtcatcatgcccaactaactttttgcattttttgtagagacagggctttgccacattgctcaggctggtctcgaactcctagactcaagcgattcacttgccttggcttctcaaaatgctgggattataggcatgagccaccatgcttggcctgagcatattttaaattactttaaattattttgggctggtggcagtggctcatgcctgtaatctcaacactttgggagactgaggagggtggatcacaaggtcaggagttcgagactagcctggccaatacagtgaaatcccgtctctactgaaaacacaaaaattagttgggcgtgatggcgggcacctataatcccagctacttgggaggctgaggcaagggaatcgcttaattcgcctcctgggaggcggaggttgcagtgagccgagatcatgccactgtactccagcctaggctacagagatagactccatctccaaaaaaattaattaattaatttaaaaaattattttaagtattctataattttgaaaatacttacatggcatttcaaggactcaaaatcttactttccccagagctactcataaatcaaaactttgtttaaaataaatgaaaacagaggtacaacataccaaaatctctgggatgtagcaaagacagtgttaagaggaatgtttattgtgctaaatagctacctcaaaaagttagaaagatctcagtttaacaaactaacatctcacctagaagaacaaactaaactcgaagctagcaaagattttttttattactgattcaattttcgaacttgacattggtctgttaagggttttaatttcttcctgattcattctttggaagttgtttgtttctaagaattttctctgtattttctagtttgtgtacatagaggtgtttataatagtctctgaggatgtgttttgcttgtttgttgttgttgtttttggtaggaactgcctcccctaccccgccgaaaaaaaagaaaaaaaaaaaaactggaccaggtggattcacacccaaattccaccagatgtacaaggaagagttggtaatgattctactaaaactgttacaaaatatcaagaaggaaggactccttcttaacactttctatgaggccagcatctctctgatagcaaaacttgtcaaagacacaactaaaaaaggaaactacaggccaatattcctgataaacatagacacaaaagtcctcaacaaaatactagcaaaccaaattcaacagcacagcaaaaagttaattcaacacaatcaagtaggcttcattcctaggatgccaagtttggctaaacatatacaaatcaataaatgtattcataaatctccttgagttggaaatatatttaaaaacatgattcatcatataaatagaactaaaagcaaaaatcacacgatcatctcaatagatacagaaaaagctttcaataaaatccaatataccttcatgataaaagccctcaacaaagtaggcatcaaaagaacatacttcaaaataataagagctatctatgacaaacccacagccaacatcacacagagcaggtagaagctggaagcattctatctgagaacaggaacaagataagaatgcccactctcaccactcttactcaacatagttctggaagtccttgccagagcaatcaggcacaagaaagaaataaaagaaatcctactaggaaaagaagaagtaaaactatctttctttgctgatatgattttatgcctacaaaacccaaaagattccaccagaaagttcctggaactgacaaacaacatcagtaaagttttaggatactaaatcaatgtgtaaaaatgagtagcatttctatacaccaataatgttcaaactgagagccaaatcaagaatgcaatctcatttacaatagccacaaaacagtaaattcctaggcatacatccatccaagaaggtgaaagatgtctacaaggagaactagaaaacactggtaaaagaaatcgtgtatggcacaaatggaaaaatgttccatgctcatgaagtggaagaatcaataatcactaaaatggccatagtgcccaaagcaatttacagattcaatgctatttctatcaaactaccaatatcatttttcacagaattaggaaaaagctattctaaaattcatatggaacccaaaaagagcccaaaaagagccaaagcaattctacacaaaaagaacaaagctggaggcatcacattactcaacttcaaactatactataaggctacagtaaccaaaacaacatgatactggtacaaaaacagacacatagaccaatggaacagaaaagagaatctagaaatacagctgtgcacctacagctatctgatcttttacaaagtcaacaaaaataatcaatggagaaaggactgcctattttaaaaatggtgctggggtagcttgctagccttatgcagcaaaccagacccctacttttcatcatatacaaaaactagctcaagatggattaaagatttaaatataagatctcatattataagaatcctagaggaaaacttaggaaacaccattctggatgttgtccttgggaaagaacttatgaccaagtcctcaaaagcaattgcaacaaaaattgacaagataaacctaattaaactaaagagcttcagcacagcaaaataaactatcaacagagtaaacagacaaattacagagtgggagaaaatattcacaaaccatccatttgacaaaggtcaaatatccagaatctataagaaacttaaatcaacaagtaaaaaacaaataacctcattaaaaagtgggtaaaagacatgaacagacacttctcaaaagaaggcagacaaacagctaacaaacatgctcaacatcactaatcatcagagaattgcatatcaaaaccacaacgagtaccatctcacaccagtcagaatgactgctattaaaaagtcaaaaaacaacagatgctggcgaggctgcaaagaaaagggttgaatgcttatatactgttggtgggaatgtaaattagttcggccactgtggaaagcagttgaaggtttttcaaagaacttaaaacagaaccaccatttgacccagcaacccattactgggtatgtacccaaaggaaaacaaatcattctaccaaaagaaacatgcactcgtgtgttcatcacagtactagtcacaagagcaaagacatggaatcagcctaggtgcccatcaacagtgggttgaatgaaaaaatatgatacatatacactacgaaatactatacaaccacagaaaaaaccctgaaatcatgtcttttgcagcaacatctatgaagctggaggcttttgtactaagcaaattaatacaagaacaaaaaaacaaatattgcatattctcatttataagtgggagctaaacattgggtattcatggacataaagatgacaatagaccctgaggattaatggcagggaatggggagtaaggactgaaaatctaactgttgggtactatgctcactatctgggtgatgggatcattcacatcccaaacctcagcatcacacaatatacccatgtcagaaacctgcacatgaacccccgaatctaaaataaaagttggaaaaaacagctattgatacatgtcctgtgttctagttaaagaaaaaagcatcttcttaggcttcagtttaaaatgtccactacattatatttgttagtttttgttactctgtttaggaatctgaggtcaatgaagttaaaattgtcatgttaataggtgttttagacttaccgcttattaaaagtatgttttaaagctgaatcatacagtgttttatattatattgattttgtttatattgaaatcagcttaatatgatgtgtgtgtgtgtatcaatataatactagtcctacagtgtggttccacaattcatccttcagcccttcctccatatgctgtcaaatactgtttacctacaggatgccgggtaactctgtgtttgtgtgtgtgtgtgtgtgtgtgtgtgtgtgatctcacctatgttaaagttagacttcattctcatccacctctcaattagatacatcctggatactaaaaagtttttgagcagttgaattaactgtcacaaatatcacttaatttcattctcagcttatttgccatgtattcatcttagtctaagcccttctttcaataactgtctgctcttcctatatccatagttccagatgtcaaggttatctagcttctcaacatagattgctaagggttgacttactagagtcagatagacaaaaaaaaaaaaaaaaaagaagaagaagaagaagtaaatttggagaaactgtcactgagagaggatgtagaagaactcaaacaatgacacaagaattggtaaggtgcagtcactgagtgatgtttagggtaaaagctgggtaagaaccctgtatctcatcaatcactgaagcattatagaattagagaatgtagtctttggtgtccataatcaaagtttcagtcttcacaaaatgattcaattatattcattatattctgtgtgagaagacaggtaagtgtgtagaacttactagaaggatttccttcaaaagtggttaagatttttagagttcatacttaaggggatgagatttagtttcaatgaaaattaacttctataaaatatctcatttcccaatatgtcagataaatgagatattatgcacataatcctaacataaaagacattctctgttccccaattatgtaagaaaagggaactattgatttaggtactttgtatctcagttaaaaagcaggtcaaataggtagcatttcaagggtcttatggtttctttaagagattctgtaacacactatttgtacataagatttttttaggatcaactgactgcttcacagagagcctgacatgtaagaattttttggtcattgttattacctgatcatatcttttttccctttaaattttctatgtattataggtaggtggtgttttcactatgtgtctttcacttcttagctttaactcatttgtgtctttgtgtgtcaagtactacatagaattaaatcaaataccttccataggtattcataaagttaccatagatggtcacaccagaaataaagaaaaacagatactggcagccacatctttttgtgtgtttagagctataagtggtacctgagagtaaaataaaagatctttcccaaaaatttggaaataagggaaatggacttatcagaatggtaaactatacaaggttgtcttcttaaaggaaaatgaatcacagcagtggctttttaaaagtattaactcatttaacaaaaaatgctttaatcctaaatgaatgtattgtcctagatctgattggtataagagaaaacatttcagatattcaaaacagagggtattttatacaagtaggttgttctcaaggtgttgtaaagaagggctggaagaacaaaagggaaaggtggcaggtactggatggaagaaaaggatgattgacaggagctggtgcttactgctacacttgccgatttgacatttgaaccattatgggacgctgccccaaccagagctgaaatgccaacaacattccactaccgaagaggcagaaaatgcagaagagatgcttcttctgtctggaatgcttgaggctgcaggtgctttgtcccctgctgacacagcagctgtcaacaaagccctcagctcttggagctagaaactggacgttttctttcttcctgcttctgtcctcctcacagtgcctcccactggcaaaacccaatagaaggccaacaagcaagagagttggaaatgtagtttgtagtttgtaggttcagccgtacagaacaggctatagaagcgtggatgtgtagctggggcggacgtcagatgaatcaccttcttagctactcggcattcacacacacccttgtacttttcaccacctttcattaccaatagcaatcactctatgcttccaatgaacatgatactactatgctttgtacaaatgacggtgctctcacctccctcatcacattcttatctgggtgatgttaattccccttttagttcaggcacaacccatctggatattcttcaacataaaaaaactaaactataaattaatacccactaaccctatttacatgaatcaatggggaaaggaggacggaaaattggctacaatatacaaatctctgtgtcataagcagaaataaaatatgatagcatttataattcttgtttatataattagttgtgagaccatagctgatatttacaacttcttctctttgccctcagctggtagttcatttgtttgtagttcttttatttttattttttgtagagatagggtctctctatgttgcccaggctggtcttgaactttggggctcaagtggtccttctgctttggcctcccaaagtgttgggattacaggtatgagtcaccacacccggcttatttggaattttttacttaggccactggatcttcattactaagggggtctatgtccttcctgttctatcttgattgggttgctgcagattttcaatgcttatatgattggacctggtcatataaagagatgcccttttgaatgtcctgactgacaatgtgcagtaggaagccagtttctcctccaatatgataccttttctctttgcctgttataggaatgctatgaagagagggttaaaaagaagccaatgtgtaccaggtgcttagaacagtgcctgatacattatgagtcatatagaatgcattaacaaataaggtcgatttacttctggggcatatctattaagaatatcttcttttagaaagcaatacaaattataagtatgcttcacttattaatttttgatctggaacacacatgacaacagttaacaggatgcaatagaaagattctcatgctggaactgttgggttctatttctgtctctgtattaattaggtttacagtttgatattcaagggtaacatctattttatcctttggtaagagacagagtttagacaaggagaaataccagagtctgtgatttaatgattccatgaaactagaaatcacatcaagagtgcttgctttcttaagaccttctttgctattgtctagtagtcatactgaaaggcaattattatcttcccaggtgttatcacgagttatggattatatctagatggtatattaatccacaattcctcagaactcagctatcgtgcttacggatttgctccttggagtttacattccttcagagtccaagcatgcacggccaaaggttgtgctctgggcccactggtgagtatctaaatttacattctaggaatgtgttaaatgtcagatgacactgaatattaaggaagaagtaagtggcggtgactcaccctctgcacagctagcctttcaagcaggatgggagatttttctttttataaaagttcatttaagagttactaagattttatattcgacataaatttcaagactgaacataggtccagtgaagggcagagtctacattttattgaaagaaagataagttggctagtgtagtaggcaaacatgaaatttttcctaatttagtgacatattgaaggcagatgtttttctttctaatcatgggctcaacatctaagtaagtttaagattaagaagtaaaaataattgaaagtccataagtgccacaatatggcaacactgctccccaaaaagtaatcaattaaaaggttgagtttacctcatctgttaggataaaatagtttcatgtgatacagcttcataagaatggtatttaaaattacatcaatatcagcttttgatattcatatttcagaaatctatatctgaaatgtatatctatatttcattagcagttaacagcttgacaagattatgttttctattcctaatataatttttcaaacccaattaatagcacttaattatcataaactagcaggacagtcttcagtttcaaaacatcacattacactttggtgcatttttcttgattaattagattttgcttctttagatggaaatgctcattagtcttagatattttttggcaatgtttgctaatgccctatcattttagtgcatgctgtcttcactgaagagtatattatataaatattaccttggaagacagctctatgttttaatttctgcttccttatttttgatcacacctctctttttgtttcagagattggttgctttccaagcagctaacaccatccatcggcggagctgagctgtagtctttattgccattaagcattttatagcccagacccctctgatggatacttacccttaaatgcaggaatggcaataggccagcttttcttatccattcaaaaaaaaaaaaagaaaaagaaacaaaagaacacgtcacatgagattgaaatttacactttttgaaaatgtaagctgcaaatggtagttctggctacaaaattggctcagcggtgtctcctgatgttctggcaactttaaataagggggacctgcattatcaacctgcatcctgcacagacagtagctacgttaaccttaagaaatcaaatgccacaaagctctgataggaaggggggaatagaattgggttgtaaaacctagtctgccatggcttcattcattccagactcaatcctgacttacagcacagagttattttctcccttggtacttttctttatgctgtactcagtatgcaaacgcttttccctagtcaatgatccatctctaatcactgggattgaagagcaatgtctttatttagaacaagtcaactatatgctaccaagaagttaaagcccatggtcttcaactggtttgtgaaatatttttgtgcccattaagtgattccatatctgagtattctaaatagccctggatggctagcacaatcatgaaggatattacagattcagcttctttttgttgatgattcttttaatgtgtccttattgacttaagaaatctatgaatcaatcttaaaaggcagagttttctatcattaaattatgatgtgatactcaacaaaattcagtcaaacgtggcaatggtgtacaacggtttcttaagatattcatctaaatagagcccgatgctatgacattttaaataaaaaatttcattgaaacagaaaatttatcatttctatttttaaatattttgctggcagaaatcagaataaattttgaaagagttcaatttttttgttcatctaatatttcttaatgataattcttgttctttagattatccacacatgcagggaaatactattcaatgttttctatgaggaatatgcttcacagtcccaaatatgatatggttcatcctccaaattgcaaattgttcatataataaaaaatatgaatttgatggagaatttttaaaaataaaaagacatacagaagttccatattcttaccacttgaatgtagtattagctcatttttttttctaatctgaccagtttgttagctattatttatggttcagaaggagttgccctgtacctatctggaaaaaacaaaaacaaaacaaaataaacagcagcaacaacagcaacaaaaaaaacccacaatgattctcctgtggtttttttcagttcttactcaaccaaataatgtatttgactcttatggaaatttcaatatagaaaacaattgacaaagcctttgaacctaatttttagatgctaatgtgcattgtcaagttaaattcaataaattggggttttataaattttgaaataacataaaaattaacagaatgcagcaggaactttttaaatgctttccttgctttcaattgtattagagggaaacccttcacattttgtaatattctttaataaaatacaataatgttttccataagaaaatcactttgctttcttactccccacttagccaatgttacataacactagtggagtctaagattgagaattttatgactgtgtcttgtattgtaacattcattggatcgattctccagggactcttaaggatgatatgcgagactataggtcattgctatgtgatatggctaaaaagttgtcttggttccttagtgatgtcatacttatacagataaatacacctggataaatacacatgtacaaacacattcaccctttcacattttttttttttgcaaagaagcaaataagtgtgttatttaagacatctaaatcttaatggcaatatataatatagtcaagcaaacgctataggggaagtctgccttcaacctgcttaaaccccttaaatccctatacccccttaggagatatacttattctacaaagcctcagatttctcaactattacaaagagaaataatgtctactttaagagagttggtgtaaaaaattaaatataacttacacaaatttctggcgcattgcaagagttttattaagaataacagtttatggccaggcatggtggctcacacctgtaatcccagcatgttgggaggtcaaagtgggtggatcacaaggtcaggagttcgagaccagcctggccaatatgatgaaaccccatctctactaaaaatacaaaagttagctggatgtggtggcgggcgcctgcagtctcagctactccggaggctgaggcaggaaaatagcttgaacctgggaagtggggattccagtgacccgagattgtgccactgcactccagccttggagacagagtgagactccatttaaaaacaaacaaaagaattacaatgtattaaagtgtttgtatgttttattgcacatttgctctcaaatattttttctgtgtcaagagaggttcccaggccaaagccaagccaacttttacctttcccaagtgccttttccacatattccttttacagcaaggtagataaacaaaaaagtaaaatgaaaaagaaagaccaggtcagagcaaaatagtacaattgccaaattcaatgtatagtaaaaactgaagtgtttatccaaatatttaaggaaatgttacaaaacatatttattttgaattaaccaaatatttgaggattataatataattatctggaattgcccttaattcttcaacttttcaagtctcattttatttggaatgctttaaaatcattctatgtacaataatatgaactatatagataggcataataaaacaaattacattgtcataaaatattaaaatgatgaattgatatttttctggcctagtttcatcatttttgtatgtagctattaaactaaaaacgaaagagcaagtgttatagttctaaagaatcccatagcttttctctgatgaaaataaaacatgttgtgacctcatagttattaaaaattaacactttctttttcacatttattttcataattgataaggtataatcaccctaacaaataaaggttttctaattgataatatttctgcctaaggatttcatgtttgatcacctccttgggaggcaagagcttgtaccttaagaataaagttgaaattatcacatatttagtaaattgtgaaaggtcaaatatctatgagtgatgctgatgagtttgtagtgattagttaactgaatttaagctaatgattaaaagatattaaaaatttctgaactcttttctactttcttgccaactacatcttcctctgaccacttattttacttatttatctattgaaatcttcctgaccccggtacagctagggattgcattttatttcagagtctttctcttcaaataattcatcttttgctcttttctgcatagcttcattaacacaatcaatatttttttgtgattgtgccttagggatagagtccctaggatgcatgtatttcttaatgttagcatgatgccatttttacataactgatagcaacatagctcataaaaattttgcgtgtgtgtgcgtgcatgcctgtacacacatgtatgcatgcgtgtgtgtgtgtgtgtgtgtgtgtgtgtgtgtgtgtgtgacagagaagagagagagtcaagatatgtggtgtagctttttgacagaggccagaagtctaccacctaagtcaaggacttataaaaacagactgcgtgcatttcttctcttttgcaatcacataaaaattattttaaagcagtcctagaattggtctatggatatgtacagccataggcacagtcacagtgtgagcagatccacatattctggaaatcacaaatagctgccttggtcaagagctcaaattctaagctttaacagcagggggaagaaaacatgaggtgtgctttgatcctgctgacaaaatgaggtattcatacaagatgctactgtcaaaatagtttacttcacagcaaaaagagattctttgaagaaatatgctcaaagcgaagcatgtacttattttatttgcaaacaaaaataaatctttttatactcacaggtggaaaatcgaactctagaagctcctcctgaaggaacagtaaatgtgtttgtcaaaacacagggatcccggaaagcccacgtgaggtgggaagcaccttttcgccctaatggactcttaacacactcagtccttttcactgggatattctatgtagacccaggtaatttgtttttattttctaaactttaaataacattagaaaacaactcatttttatttaaaatctttcttttggctaaaatctttcttttagccacagatgttggtttctttattttcctgaaaataacctatacggataagctactgcccgacggttctcagaatgtggttcccagagcagcagcaacagccacatctgatgaacgcttagaaatgtacgttgtagagcttctgccccagcctagtgaatcagaaactctagaggctaaggtctaacagtctgtgtttaagcaaaccctttaggtgacacatgctgaagaactagtatatactcttcttcccttgctaaaaagtggttcaaacctaaaacatcgtgtatgcaaagagttgaactataattttgcagtccatcttaaacaagccatttttgtgactgttttagatttctgaactatcttagtaattctgctgtgtgttctgataaatttactgaatgtggattaggctacatggggttccttgaaagtattttcaaaaactatctgattcaataagttaggtgctatggtagcatgatgtttattttaagcaaactctaccataaaaagagcaggtatatattttaatagaaactttggatctgtattaagtgctgttgtttatcatcttccaggagtggccttactatttttgtaggaggaagtttgaacctttatttttaaatgagtagcaaatatgcaatatcgtggattcagtcagacatgttattagcatgttagtctgttgcttaggcttgaaaacgtttctttgtttctgaattttctatgagtctttgtaatacttaataacatcctccaagtgtaaaaacaggtgaagaaagaaaaaaacaggcttttctaaatttgaaaagggtggttatttgtgtactgcactggcaagcaaatgcgagtcaagtgcgtgtcagagtctaagctgatcccctcaaagattggtgtgtcccttttttatgcaatcagggctttcatgtattctgctgtaaagcacttgtaagattatgaggtgaaggagtgatgatcgatttgaaaaaagaagcaacatttaggccggacccatgacagcccagctatttccgccaaggcagctgggtgaataatgcaagagccatattccccctcgtgtttaatcttgcattgtttttgcagagaaaatttctgcttgccttctaagtcatgtcatcttcagttgtcatcccgtctctcaaaccatcaaaacggtattaaatgttgcaaagctgcgcggcaagagaactttcaaaagtcagaacccatttaccgaacagcccttgtagaaaatgtattctgttctcggcagaattttccttcagttctttccactgagaagtttactgatttctcccagtggaatctgctggaatttatcggttcatggttggcagtcacagattaaggtaaatgtcgatccgtaatgaccctctacatgttagtattgcagtaaagctgggcttttatgtcaaagatatcggagagggagctattacacatgacaggggtgatcaagggactccagaccaaggcaagcattattaaatattgactagttctgtgatttatgtagagctggaggaaaaaagtgactttttaaccattatatattcttcagcaacgaaaaccagccatttatctcctgctggtaataaagaacagagtgcctgcatattttagtggagggaaaacctggtcttataaatgagatgaactccttcgtgataacatttcagtttgttaattgccaaaagcaaaacagacaaattggaagcaattacgagatttgacttaaagaatttttgcggtacgggttcaactcaggggttggaaaggggtgaggttggaagcaaaaggagcatctgagatgggccccaggaaaattcgtgtcattggttcactggcactggaactctcatgtccactgttaactgaaaggattttgaatattgtcttgtcctgtcacccatcagcagctgggtgacatttacactgagggtagggaggtctgcatggctctacaagaacaaattaaacattaattcatcaaacttatttaagatatcatctgttcactagatttatacaaagcttattgaattgtctaatggctaattggttatttccttgacataatgaacaactgtatttcatcctttcctgtgatggctgctaaagagggggtggttagaatttataagatagggaaattcagctagttcaaagcaagtgtagtttcaacataaaagtgcctgcagctgggtcactattttgcaggagaaattgggctgtgtctgtaagacaccctcatgggaaccctattcttcatgtcaactcgtatcctgaactaaaaactttacaaaaacattaggtttcgtaacaacaagtgaagtggcacgtatcaaagtgtgatttttcttaaaaattgttcacttttgaccacgtattatgttctcatgaatcaaaatttaaaagatagaaaaaaaggaagtaaagtaccaagcctgttctgcagtctcagaggaaaagtagtgtgctcagcttcttatatccttctagaaatatttgtcttataggtgtgtgtgtgtgtgtgtatacataaacaaacacatatttcccccatttgtaaatacatatagttttcatctcacacatgcaacattttatactaatgataccaagtggtacacattattttgcaccatgctttttttccatcttaataatttcagagaaattatcacagcaattcctaacgagcttcctcattctttatatagcttggtaatattcaacgggttagagcataccatcattggtttaaccagttccttattaatggccatttaatttgtttctaatcttttattatttcaaataatgcctcaatgaataaacatatgggaatgtcctttcacactttgcaagtaaattaatacgataaattccttgaaatgaattgccaggtcaaggaaaaatgaatttgtaactttgtaagatactgtcaaatttcattccatagagaccatataatttatattctcagaaaaagtatgagggtgcctgtctccccacagtcttgtcatcagagtgttgtcagacttatctttgccaattcgatatgttaaaaatggtagctatttcacagtatcttgagtagttattaggaattagttggaacttatgaacatattttcttaagtttaaaaactgtgtttcttttttttgtgaatgcttcatttgtatcttttgcccacatttttacagaggtttaagaagttctttatatattaggaaaatctgttatattagtagaaatttttcccttcattattgctttttcctagcactctactgctttcttttataaaatatttatattcagttcatctgaaatttatactgatataatatgtcatgtatgggtcaaaccttattttcttcccagaaaattttcctttctctcaaaaccatttactgaataatccttattgttccccactggcttgggttgtcatctccaagagctcctaaatttccatctttattaataaatacgtgtggacatatctgtacctttatttacattatcaaggtatcttaatgattaaaactgtagaatatattttattgccttgtagatctagtcctcttcattatttttattttatataatttcctacttattatttcatatttatttttttcaaacaatatttatatatttctaattttaccccagaagtcctgatgctgtttttataaggatggaacagaatttacaggtgacttaggtagaattaatatctttatactgtcgggtttttctgatcaatgatatcattatactttctattttgtgtcttttgtgtctctcgcaagagctcaaagttttcttcatatagatcttgcatatttctgttgtgtattcattaatattttataattatacatgatttaagtaattatgataatatatacattttacatattaacattaaaattaaataactgaaaagagctactttcaataattatatgtagacttcactcgcagatacctgtcttctgaaagccacgattttaaatgtttatatctattagatgatcgttcatctaacttttacaaatatttgaagtttttttgctgctaagattattgtcattttctctaaaatgcaggcatcttaccaggggaaaatgataatctaattaattagactctcaactagtttgtggtgtgtaaaatggcaacaaaggttggacctgaagaatctctgtcctgacagaatttacaaataaaaaagctaaggcagacaaacttagccaagttattctcaagtgcatgaggcaggaaagaaactagatggtgtgacaagtggaacagaaataattaagggaagattttggtaatactgggtctttctctttaattatggatgagaataaactgaatatggaaaaactaaagagaatgacggagagagcacaaacacatgtgaatggcaaaaattaacagatcaaccaacctacacttggttatattagaatgtatttttgccatttgctaacatccaccataaaagtaaggattagcacttttctatgggattctacctgatttgaaacatctattcaattatgaggaacatatgatcaacaaattagtttttctagggtgtgcaagtgccatttactgacctggaataagtgctttgctcaatgactctcaagggtgcaccattcaccttgcacaggtgaatagtcaactcccagtgatcactttacaacatcttcagtattttttcacacatatgaattaactatcaatttaaattatagataacaggtttataatcattccttgtgaaacatattgaatatataatttttaaaaaataaaacaaatgtgtaagtttgggaatacaaataaaactttacagcatagtagtagcaacctggcttatgtaaaactatttataaaattataaattctattccatttaactggtagatgaaagtattgtgccatgataatttagggttacatcattattttacagagcttcaaaagtattctcagctacaaatataaaacaacctaattgtcaagaagaaaaataaaaactatgaaaagataaagaaaatattctgagatcctatagaataatttttacaaatggcagcttctttactactagacttcccttggattcttcacactgatcctgtacttagtagacaatgccatgtcttagtacacatatcctgcttttttcttaagtggttattgtggagtcctctgcgaattgtttaattcttcattatccttccttttgaatgaattgggacgtgatcttcattgcttgatatcctgacagattgctttgtgtcagagtttctaaggcaaggcaccagcgtgtgctaattgctgagtcctttgtgcactgttaactctcacctgctctgaaaaactggattgcagcttagttttcatcttcaaatgtctctttctcctaatcccctattttgtgctgtgccacagaataaagatatttatttgaaaaagagagatatggattactgtgggggaaaaaagagggtaaatgaaaatgatccttaagcattagcaaagggaaatggcattttagaaaaacaaaagaaaagcaaagcagaatgatcagtttttaatgttgaaactgaatcatttcatggatctcagataactctttctgaatgtggagaggtacaacaaacaggttttaggtgacttttcccagagtaaatatgtctaatccaaaataagtcctcaaaagtaagggtggaaggtaaggaccgggaaagaaaggaaatggaagatagaaagaacaatttttaaattgttaaatgctcatgaaatgagcataatcagatgctttttatttgcttataagacctgatggtcctgaaaaaaagaaacccaattagtatttaagaatgtttttaaaaaggcaaatgaaaatttgggaaatatatctgttatctctaggtggttatattatgaatggtttgtcttcccatttttccttttatatgtactcaacttaaaaaaaattctataatatatacatattatttttgcaaaacattataaaaaatagctcacaagagcagatgattcaagagcagagtaatttggagtaagcatggtgcttctggctccaaggaggagatccgggtggtgagtcagaagtcctaaggtggaagcttacagaaagaagggcatcttcacatatttccaatgattattcaggaaaagtcttttggtgacttgtgggatgttaaatttaactttcttcttatgttttggctgcatatgtttttccaacagttgctaggggtaatcaaacaaaaacaccaaggattctgcaaaacagaaaagaaaactaaataggagtggtcagagaaataaaagagcctctttatacctgagacataatggtagtgttaggggaggactgaggcatgggagatttggtttttttgaggttacattgtggggatcaggaggggcataaagtttttactgcagtggtaacatctggaaggagtggggtgccttaaagaccgattaggatatttccaggtagaaaagatagagtataaatgtgatggctccccatcccccattctctgagcctaaactttttcttctgttataattggagtccatatctcatttcaatattggtatcaagtgtttgctctttgggataaatccccatctaaaaacaaaagaaattaaaggggaacggaaactgcagaaatgcagaaagtatttcattgctggtttaaactagatgaaagtgtatttttaactacagttccgaaaaatcctagcacccagaataggcttaccttctcctggaattgccagttaccagaaagagtgctttagaatgtcagtatattcaaatgctctaaatctctaaaaaatcttgaaaaaccaaagaaatgcagttgatttttcaaggttacccagagaaatccagtgtccttttcacacactctggttctctgggtgcttttctccccagaatatactgtgttttataaaaattacaagatggaaaaaaaatatacagaagcgtttattttcttgagaaggtaaggaaaataattatatgtgggaacctcttagacttccaaagagtctgtaggaaggctaatgctgttaggaaagggacagctttgttttatagtccctggtatctgttttttagtgtggagggaaatctgcggtttcagagctgtgcttgcaacccatgcagtatatctgacacgctgccctctgggaaaacccgccagtgggggaattgttccagtgatgcagtacagcttgtaacttggaatcccgtcggagaactttgtagttgcttgtcagtcagtgggaagataaaagaggcagcttcttttcaagcaatctgaattcattttcccgtaatgagttagggggtcaggcagcaggagtgagttcacctgagatcttataaagtatatttcctggtggaagaaagagaggaggagaaaagggaacataacgtccaccacgcagctgtagaacggcgtaatgtggcttgtcgttggtctatttctttttatgcccacatattctgatttcagagcatatatttttagaaagaaaggtcaaagaaagtacagctttatctcatttaaaaatataaaacccaatctgtgaaaattgaaacccagttaaagtctaaagcagcaagtgatagtgtttcatacacaaatactcatcaagcaacaacatgttaaagatattgtactatgtcttctgacattacatcattattaaccacacaatttattttagagacttagaagaaattaaatgagtgtcatgataaggagttcttttagttacagacaacagccccagacctctcttcctgaccatttcagatgttgtttctaaatcagcacaaaagatattaggaataaaaactgtgggagaatgttcttatggtcaaagcaagtattaatataaaaaacattgggaatgtaggggaaatagagaaaattactctgtttctatttgtttggaagcaaatgtctcttatgcaaaaaagaaagtatagttattatatctttctgtaagtttccaacacatttctggatgtataaatacatacaaatctaaacacttgggaaatcaaaaggcattttttctggactacaaattatggccatattgttaatgaaaatataaacgggcaataataagatatctgtcatttcaaatattgggctatagaatgtatatgcactgaatgtattgacacttctgattgtatatcatgtcatggccaataaagctatagaaatgtttaattaggacatattcttccacaagaatggagttaagcattaatttatcaaacttgtttaagacctcatctgttctcaacactcacacagcagcttattgaatttgtctgatatctaattggctattttcttgacataatgaacaagtgcatactctatgctgttgtgtctgttgaggcggcgatgtaatgatgaaatggaaattgtaaccatgggtcgtacactgattcaggatatgcagcccacagagccatgagagggcacaggatttcattgtcctcatggcttaactttatgtttcaaactctgcagagcatctctgtggaggaatctctccattctaactcctcatgaaaggagcctgttagaagcaaaatacaatcagcagatcacccagatgatgtacctttggctttggaaggctttgcataatttaaaaaataaaataaaattctcctatttagagaaatttttaaagcatttaaaaatactcacaccattttcaaacccacaccacaagtgatttgggggatttctaatacatgcatgataaagttcaactggataagccagccgtggggcagatatataatgtttacctatagttgtgtaccactgatatgcctgtctagtgttggtttttgcatgctttgttgtggcaagagttcagtgcttgttgaataaatagtaatattagaatcagtgtttagattttggtagactgaacatatagccattttacctaggaggttctcagtaggaaagtgtcagctgtgaattgatgttagagggaaacagaagaatggattacacagagaaatagaaaaaaaatctagccatctggggccaatgtccttctctagcctctaagacacaccctacagcaaggaattcccttctctgattcctgaacttctcctgtgggaatctagggatcaacttccttggatggtgatgggtccttatcattatacagagttatgaggattacaaaccatatgtttggccccttagaaagtgataataggtgactcctaaatcatagttctatataccaagaacagcccacatcaaacatatttcccaaatttttgtgtgaaattcttcataatcaatgtgttactttactcaattattagtgttgcagaatctaaggattctagtgggctatttatgaaaaaaaaagtatatggcttttagagaatttggattctttatttataaatcgggttgcaaataaaatttatgtttttccttctagcaatatgcctttggggagaagcaaagggagttttacacccaagaagcagaaatcaaaaatcatagaattaaattaagaaatttatttgtttatttggacattcattcatttgttcatgtagaaagcatgtatctagcttgttttatggaacaagacagaaactaaatgatagctgctggagttgagtagagaaattttctctatccagagttgaatcatatgttgttttattgtgctaaatttgttagacatttaaatttatacgaatgatggtgcctgtttctgggatatttattccttcccattgtaaacctatttctccaaatcatcactatgctaacttaatcactatgctttcaacatctgaaacatttagaaagtacttaaatatctggcaagcatggtctgtgtgctgaaggggcttgtggtttaacaaggggagctagaaattacccaagtaatcatatagaaatataaaattacagactttaataattattaaagtaaaagtatatataactaagattttcataataagaagcttaatataaattggagggtcaagaaagtttctttgagctgatgacatttagggtaactgtaacatgactagacaccaactcagaaactagaaagaggattccaaagtgaatggcatttgtaaaggatgtgaggaaggtaaaattgtggtggatttgaggaaatgaaagaaggacattgtagctaggctagggagtgaagaaaagaatggcacagatgagactagaaagttagacaggagctacttcatgcagcagactgttttaaggactttggcataaagtaaaagtgtagttgcaataattacaaaaaattttcaaattttcaattgtttttttttattattattatacttcaagttttagggtacatgtgcacaatgtgcaggttagttacatatgtatacatgtgccatgttggtgtgctgcacccattagctcgtcatttaacactgggtatatctcctaatgctatccctcccccctccccccaccccacaacaggccccagtgtgtgatgttccccttcctgtgtccatgtgttctcattgttcaattcccacctatgagtgagaacatacggtgtttggttttttgtccttgcgatagtttgctgagaatgatggtttccagcttcatctatgtccctacaaagtacatgaactcatcattttttatggctgcatagtattccatggtgtatttgtgccacactttcttaatccagtctatcattgttggacatttgggttggttccaagtctttgctattgtgaatagtgccacaataaacatacgtgtgcatgtgtctttatagcagcatgatttataatcccttgggtatatacccagtaatgggatggctgggtcaaatggtatttctagttctagatccctgaggaatcgccacactgatttccacaatggttgaactagtttacagtcccaccaacagtgtaaaagtgttcctatttctccacatcctctccagcacctgttgtttcctgactttttaatgattgccatcctaactggtgtcagatggtatctcattgtggttttgatttgcatttctctcatggccagtgatgatgagcattttttcatgtgtcctttggctgcataaatgtcttcttttgagaagtgtctgttcatatcctttgcccactttttgatggggttgtttgtttttttcttgtaaatttgttggagttcattgtagattctggatattagccctttgtcagatgagtagattgcaaaaaatttctcccattctgtaggttgcctgttcactctgatggtagtttcttttgctgtgcagaagctctttagtttaattagatcccatttgtcaattatggcttttgttgccattgcttttggtgttttagacatgaagtccttgcccatgcctatgtcctgaatggtattgcctaggttttcttctagggtttttatggttttaggtctaacatttaagtctttaatccatcttgaattgatttttgtataaggtgtaaggaagggatccagtttcagcttctacatatggctagccagttttcccagcaccatttattaaatagggaatcctttccccatttcttgtttttgtcaggtttgccaaagatcagatagttgtagatatgcagcattatttctgagggctctgttccattctattggtctatgtctgttttggtaccagtaccatgctgttttggttactgtagccttgtagtctagtttgaagtcaggtagcgtgatgcctccagctttgttcttttggcttaggattgacttggcaatgcgggctctttttttggttccatatgaactttaaagtagttttttccaattctgtgaagaaagtcgttggtagcttgatggggatggcattgaatctataaattaccttgggcagtatggccattttcacaatattgattcttcctacccatgagcatgcaatgttcttccatttgtttgtatcctcttttatttcattgagcagtggtttgtagttctccttgaagaggtccttcacgtcccttgtaagttggattcctaggtattttattctctttgaagcaattgtgaatgggatttcactcatgatttggctctctgtttgtctgttattggtgtataagaatgcttgtgatttttgcaaagatactcctcgagaagagcaactccaagacacataattgtcagattcaccaaagttgaaatgaaggaaaaaatgttaagggcagccatagagaaaggtcgggttacccacaaagggaagcccatcagactaacagctgatctgtcggcagaaactctgcaagccagaacagagtgggggccaatattcaacattcttaaagaaaagaatttttaacccagaatttcatatccagccaaactaagcttcataagtgaaggagaaaaaaaatactttacagacaagcaaatgctgagagattttgtcaccaccacacctgccctaaaagagctcctgaaggaagcattcaacatggaaaggaacaaccagtaccagccactgcaaaaccatgccaaattgtaaagaccatcgaggctaggaagaaactgcatcaactaacgagcaaaataaccagctaacatcataatgacaggatcacattcacacatagcaatattaagcttaaatgtaaatgggctaaatgctccagttaaaagacacagactggcaaattggataaagattcagacccatcagtgtcctgtattcaggaaacccatctcacgtgcagagacacacataggctcaaaataaagggatggaggaagatctaccaagcaaatggaaaactaaaaaagtcaggggttgcaatcctagtctctgataaaacagactttaaaccaggccgggcgcggtggctcacgcctgtaatcccagcactttgggaggccgaggcgggtggatcatgaggtcaggagatcgagaccatcctggctaacaaggtgaaaccccgtctctactaaaaagacaaaaaattagccgggcgcggtggcgggcgcctgtagtcccagctactcgggaggctgaggcaggagaatggcgtgaacccgggaagcggagcttgcagtgagccgagattgcgccactgcagtccgcagtccagcctgggcgacagagcaagactccgtctcaaaaaataaaaaaaataaaaaataaaaaaaataaaccaacaaagatcaaaagagacaaagaaggccattacagaatggtaaatggatcaattcaacaagaagagctaactatcctacatatatatgcacccaatacaggagcacccagattaataaagcaagtccttagagacctacaaagagacttagactcccacacaataataatgggagactttaacaccccactgtcaacattagacagatcaacgagacagaaagttaacaaggatatccaggaattgaactcagctctgcaccaagcagacctaatagacatctacagaactctccactccaaatcaacagaatatacatcctcttcagcaccacaccacacctattccaaaattgaccacatagttggaagtaaagtactcctcagcaaatgtaaaagaatagaaattataacaaactgtctctcagaccacagtgcaatcaaactagaactcaggattaagaaactcactcaaaaccgctcaactacatggaaactgagcaacctgctcctgaatgactgctgggtacataacgaaatgaaggcagaaataaaaatgttctttgaaaccaatgagaacaaagacacaacataccagaatctctgggacacattcaaagcagtgtgtaaagggaaatttatagcactaaatgcccacaagagaaagcaggaaagatctaaaattgacaccctaacatcacaattaaaagaactagagaagcaagagcaaacacattcaaaagctagcagaaggcaagaaataactaagatcagagtagaaccggaagacatagagacacaaaaaacccttcaaaaaaatcaatgaatccaggagctggtgtcttgaaaagatcaacaaaattgatagatcactagcaagactaataaagaagaaaagagagaagaatcaaatagacgcaataaattttcaattgttacacagttgaatattagttacatttagtagctaaaggcttagattggagtgtcttttttcttcagagacagttttgttaaaatggtaccagttagaccaggtgcaggggctcatgcctgtacccagcagtttgggaggctgaggcgggtggatcacaaggtcaggagttcaagaccagcctgtccaagatggtgaaaccccatttctactaaaaatacaaaaaaaaatattagccggacatggtggtaggagcctgtaatcccagctactcgagaggctgaggcagagaattgattgaacccaggatttggagattgtagtgagccaagatcacgccattgcaccccagcctgggtgacagagcgagactctgtctcagaaaaaaaaaaaaaaaaaaggtagcaattataaatgtgttattggcttgcagtcattttttctatggagatatacatatgtgtattcatgtgtttgcatatataatgtattgagatcttactacaaacacatatcatattttacacatttaacattatatcatgaatgtttcttgtattacacacaaaaaactcataacaagtatttaatattcaataggtacttaatatactatagtatagatgtgccaacatgtatttatcaattccttattgttggatatttaggttttttattcttactatttgaaagaatatttattgttaacacatacttctacatttttccttaatatgtataacaacaaaggaattgctaaattaaaggttgagtatatttttgaagacacttgatatgcatggcaaaatgctttcaaaaaaattacatcatttcacatggcttctaatagtatacaaatgtgttcatctgtctgtagttatatgcatttgatagataaaaatggtaggttgctctaatttgcatttcttttattcctattgagaccaaacattttccatatgttcttttcctatttgtttgtctttctttttttgtctgctcacacactttgcccagaatattttagaggttttaaaatttgttttggtatttatggaagctaaaataatatagatagtaattcttagtcattacaattttaaatattttatctgatttatctttttggtctttttatgaggtttatgatgtagtacttcagatttttgataattaaatctttgctaatttatttttataaaaaatattttctccgtctacagttgaaacatatgttgctttattttgctaaatttatcagacttaaatttgtatacatgatgctgcctgtttctgagctatttatttcttctccttttacctgtttctaatctgattgaattgtggtgctttcaacatcttaattatttagaaaatacatttgtatcttatgggtaaagtcattattttctcccttcaggttattattcatttctgttaaaaggtcttagttcttttcatatgcatattcttccagttgaacattagattgagttgaaaaaatgacagcaatatttttaatggagtctccttcttatacattaattcttctgaaacttacatcttaaaatatttctcatctagaaatgtgttatttttccatttacttaagcagcttgtatctccattaaagttttgttattttccccataaggacctcacattttttgttagggttattccaggtatttttacttttgtgatggtgttcatttatttttattataatatttaaaaaatctctggtattacgtcagtgtttttaaaacatgccatttttattcaatactttaaaaatatttataaatctctgagttggcaatttctccagctctaggaagacagaaaatacacagatctgtacactcaaagaacgtgagtccagcccactcagtcatatgaacttagctggatataacacgttaacagacaggatagacatttttaccttgaacagaaagagctgtaattcaagttctgtgtcacagatacaatccgtacattatggtttctttaaataagccataaccaattttttttagtaattatttgcttccagttattcatgtgagattattaaaataagcttatgaagtaaatataagatgtttcaaatattcctatccattgagaaccccagaaattatccttattgaaatttttagaaaaaaattagataggtgcacaggaaaatccttataaaattatgtccctgacagagtttatatgtataataaaaatcaagagggtgggtgtttctaaatattcaactatatggattgaaggcattgtggtaaatccattacaaagattatactgtatatttgttgatgagaaaatatatattcttacagctataaaacaatgagcatcataaaattctatgattgcaatatatgacagtagatcatatatgtatagatgtatgtccatatatacgtgtgtgtgtgtgtgtgtgtgtatatatatatatatatatctgaacaaatatgaaggacacacaccaaaatataccaaaatattaataacaatgattatcttcacattttaggtaatttcagcttttctctttatggttgctgatatagccttaacatttataataaaaaaaaattcttttgtagttagacaaagaagaaatatgtgaagccaaaataggaaaacatgggggaaggaaggactttatatcatgtttcatctcatagcaaaactattggaagcatttcagaaacaaaagaccttaaaacttcaaactctaataagaaattgggaacaaaaatcttgagattgttatacaagagatgttaaagaccttaggcctcagtttctttcagaagcccagcaattgcaattattatttattatcactttacttttgcttgaatctctttagctaaaggtggtttacttccacttttccctaataatttatgtcttcatgataatagattttcttattatctttctgatttgtacctgtttcctatttaatgatttactctgtatggcatacatgccaaagttatcatgctagaaaaattattatgctataataattatgataccatcaaactgaattaaattatgtttcattgtaaatagtaaaatgtattaatttttttaaaagcttttttatgccagcggagataaataaagttacctttatgtactttcattaaacacaatgacagtacaagccaaactgataacaaatcaacgcactccttcttgtaacactcctaagttgttctgaaatcagctttcttaggactatgaattcaatgcaatgtattaaacagaatctgtgccttctgtgaataaaagtttcacctccatctcttgtgagtatatgtaggcagatctttgaacaatgaggttttcttccattgatttaaaatgaaaatgaacctggattttaaatgtgcattctaattgtccctttagcacatcagaacagcactgcctaatagaaatataatgtgagctacatatataattttgaattttctaaaatgcacattttaaaaaagtaaaatgaaacagttaaaactaatttagtagggcttggtgcggtggcttacacctgtgatcccagcattttgggaggctgagggtggcagaccacctgaagtcaggagtttgagaccagtctgggtgacatggcgaaaccctgtctctactaaaaatacaaaaattagccaggagtggtggtgcatgcctgtagtctctcagctactcaggaggctggggtgggagaatcacttgaacgtgagaggcggagtttgcagtgagccaagatcacaccactgcactccagtctgggcgacagagtgacttagtctcagttaaaaaaaaaaaaaaagtaatataccttatttaatacaatctatctaaaatatcattattttaacatgtaattaaaacctaaaagttaatgagataatacattattttttctaccaaatctatgtctgtattttacacttataggatatttcaatttagattttttatcagatatattcagtctgcatttagatgtcataagttttcagttgagaaagtagatccacataccaaattgtttcaaatgtatttaaaagttttccagtaactgaatcaatgatcaatttttaatttaaattcattaaaatcaaattagaaattcagctcctcagccatactacccacatttcaagtgctcaatagccatatgtggataggggctattgtattggacagcaaaggtttagaacacatgtataagatgttaacacagaggaaaagttaaaagttaaatcaatgccaaactattgggaatgttttgtctaccgggtttcaagaaataatgacatgactgatatttttcttattgaatcagctgctcggctggttggctcaactaatagagtcaaacagttgctgggttttataaacaaatcatctccttttttatttggtcctccaattttcttaaggcaaatatttgtgccaaattatgccaaagtctgtctctcctgaatatccctgttatcctcgaatattgttgagtgtcccatgaatataactgttaaatgctgttttgagttaaaaccaagaacacctatattgagaaaaaaattaaatgtagttaatgttgtaccaccatgttttgttctagcttctcaactgtctcatgtaaataagcacaataaacatctactgagtgattctgtaatagtttggatctataggtccatcatttgtgatgacacatagaagttggcccaggaaagctaaaagtatgtcatatgtcaaataatgccttccaccaagtttagagcagcatttcttccccagcattacaacttcatgtaatggcacttggcagtattggcatttctgatatgacttcttttggctagttcagaattcttaaaaaataaatagtttttcaccctgtgattgaaagggttaaatagtaccaattcattacactcacaaaaggatttattttgttctcataaatcagttttattccacatttttattattcccttgggtgagctactccaattgaaatcaatacaagtgcaagtgagacaatcaatctcgatatttgattatggattggagattcccaggtccgctttttagccagtttctttctgatcatctcccccaaagaactgaatatttttattgacatctatgagttctgaacatgtttagaaagaagataataatcttcatttgtatactgacaatggaagccccacaaatgaacaaggattaaaaaataaagacttaaaatatgtagctataacatcatcagcaaacttcaaatttctcaatatttttcttaagatgtagtcatgttttaaaataactttattctttcttttaaaaaaagacctgttaatacaactggtggctacaaaccacattcttagggtgctattaggtaaatgattatttttcatgacaaagatattatttattttcacatgcttgtttcagagctgaaccatatcaactggtctaggttaacaataagaaaacagttaaggtgaataaaatgcctttgaaggtatccagcctaggtcttttcatttctataattgtccaggctggaaagccaccatctgggggatttaaaagagaaaaacagctcaactttaaattagagagcaaaattgattaagttgttcctcaatgaggccaacatttatatatcaaactctctttgctttacaaacaaatttatatcttatgatcctttacatatcgaatgcttattttgggactcatggtaccatattattgttctcttgcctctgactctagccacctgttctaggttcttaagcaaaatttttgaaaaggcacaattaaacctttccgtaattcattatttgatacttagaataaggcaattatttgatgcacttatctaatcatattcttaaaataaatttcaaggtaatattaacactgcatttgttactttcagcaaacattttagccttatttagccatttactaattttcactagaatccattggaaggggatgtttcatgttttggacaaattacctaccactgattttttttcaggaagacatataactttgaatgttgtaaaaaagtattttagaaggagttaaaatagtaaacccatatttctttcatttaagcaacattaattactcttcagttactcttattaagcctttagaatagcagctgtataagccatataagccaggcacttggatttccactggcaaacttcctaggcatgtggaattaggggactgtctagaacttatttttgtccagcttcatttccttttcagtaatttgcatttattaatgctgaataatgaaagataatcaaaacattaatgaaggtatggtgcagtgatgtaacaaagggctatatcaacaaaatattctttccacgtgctttgttccactctttaaaaaaaatatttactcaagagaatcattctagaaactggaaattgctccctttattcaggaaggcagtatattttttaaaagttagcttctttaattgtttaattcagaggttggcaaatcttttctataaagggatagaaagtaaacactttagactttgcaggcaatatagtctctgccataattactcaattctgcagttatatcatgaaaattcctagaaagataattacttttgttctaataagcctttatttacaaaaataggcagctggccaaatttggcttgtagattgtagtttgtgggaccctgttttattataactcgtttatacattaaaatgcaatttacatactttccttggatatttcaatcttctcatgattcatttgattttgcaaaaattatgaatgctaatttaaaaatctatgtaatacagaaaaacaacatccactaaaatcccactacccataaataaccaatgttaacaaacagtaaacattattttagagctgtctcaattcatgggtgattcttggtagcaaacaacagaaacaaatttggttaattcaggcagagatgaattatattaaaggaattcaacagttcaaaaagttgtcaggaaagctggagagtcagacttgtggagaaccacaaataacatagcccagaccagcttatgccttcttaggacacccccactggcaccatcaccattcagtcgccttggaaaattatcactctacttctggattctcaacaattttagaggcatcttgaataatccttagttgactgtgagccattgtttcactggatcaagctttgtagtccccagatgaaagcaatgcaactgactggcagtcccatggtcttaccacatgaacttcaggtgtcctttcatttacaaaaaaagagaaaattaagttatgtttctaatcatttctttctacatacctattatcttctccctgattgttagagtttcttgatctttttacttatgcattaattatgattctctcaaggcttttcatcataccattgatttagattttagctctattctgttcctggctttttctaacttgtttattaaatacttactgcattttttaatttccagattgtttctctgtctctgcaatatcattttatcatattatagggaatatatatcattttttcccaaactacatggttattttgtctttttatgttacaatcctttctttagctgtatgtataatactcgatatattatttttttcttcaacttcatcttgcttatgccttgtatgggcagctctgtccagattttgcactggttctgagcttggtctacttcctttcctttctggtgctagtcagtcttctttcgacctaaattttgagcactaggtgttgctagagggtgcgaagatgcactgggcagaattctggggaatccagattttctgtctcctctgagatcctattatatagcttttgtggcagcacttgctgcatttattcacatgtatctcccacacctgggaacaccagctttttcccccaactcagcacagtgcttggcaggatggccagccctgatttctcttcctgtctctgcagactctactcagttcatttctctacatattggagaggattttttttggcttatactccttcctctgggaacaaagttaggagctgcgctatactaagaaggaatttaccatctctttcttcttttaggtttcaaaattcatgtcggtcatttttttccttttcctttatacatttgtacctggagaatcttcaactaaaattgttaatgttactgttttcatagtttgtttccattctgtcaggtattttggaaagacagttgtgtggtaccacttaatttagaagctgtgaaagttcacaatttgtccaaaatctctttctagcaaggtgattcatatatacagttcagagactaacagggagactgtaaggtggcatctgactttccccacctcctggtgttcatgtccttgtttactctccttcccttgggtgtcttcaaaacctgtgacttgctgctcaccagtagaacagaacaaaggtgatagcatgccacctccataagattgtaacctgtcttgctagaagactccctctttttgatacagcaagtggtcacactggggaggcccatatgggaagaaatgagggtgaacgccaggcaacacaaaactggtaactgagagcagccttgagtcaatagccagaaaaaattgagaccctcagtctcgacagcctacaacaaattgaaaactatcaacaaccacctgagcttgcgagagatccttcctcattggaaccttcagatgggatttcagtcctggccaacaccttgactgcagtcttttgagaccctgagcacaggacccagttagctgtgccagactcctgactcacagaaactatgagattctaaatgtatgttgctaagttcgtggtgataccatgacacatcgataggtaactaacacaggaacaccttactgtgtgactgtagcaaatgaaacaggtagaattcaacagcaaaacatgatatcattctcatccagacccccaagtcgttgctcttcttttacagaggaaccatctcaagtatatatcttccagtaattagaagaaaatgttaaacatgtcattaaacaaagaatggaccataggctttgtctgggatcaataatggttgtcaaattacttgtctgatcctagtagcaccacaggctcagcaggttcagcatggttagtaaggctctaccagaactttaaaaggaaacacgttttggtgataaaatagttgtattcatgtccagtgtttagtgtggaagccggagaccactttctatgagagtatatttgttcaataacttttagctgattgagataacagcatcagtttgttcagctggaaaaaagtttgcccaaatggcaaaaaaaataagtcaaagtggaaaaaaaccctgacatttcagagcatatatggttagtaaaaatagaccatacttctacaatttacaatagtcacagtacatctctgaatttactctctctctctttctgtgtgtttatatacatatatatagtgaactgtactgaattttatatatcgtagtgaactttatatataaaatgtataatatacatgcatatatacatatatctttcatttttataactatttttagagcagttttaggattacagcaatattaagcataaggtacagagatttttgtctatcctttatgcattatagttcctttctgatattcataaaatgagatacatttaggaaaatctgactgtggtacatagagagagcttgatggggaaaaataaaacatgcttcaacaaactttaaaaaataatttgcgatatttagaacagtaattgtgcctacacgttaaaaaagatctagagaacaaaacataaagattctcgatatctatagagttgtcattgctcttgtatgggcacaaccaggacaaatgtgtctgaagcatcttttggtgagttgataaaatagtgcatgtatttattccctgcactacaattgtcaggctagaggaatgaccaatttaaagaggagtcaaagaagtacagctttgactagatgacaactaattaaaatcactattacagtaattacagtaatgtaagaaatatgatgcattaatcgagcaccgtcctcagaaggtcttagtggttcataggctatttatttctctttcaaaatatcctgtggagaagacagcttcgtaggcatatgtccataaatattttatacattgtcaaaaacttaaggccaggaatagatttctttcaccatatattaattacaaaataaacaaatactcagcacctttcagattcctaccaacatgagatctatcagaaaaatggaatctggaagaaacacttgctttttggttaaaataatttaaaataatatttttagaaggaataaataaatgtaacttaaatattaatacagggtatatagagagacctgaaattcttggctcacagtaaaggctgattttgccagtttaccttgatcacaattcagtgtcttctgattttggtattggcagaatttcgtgatagtgagatggaactgaacaactctaaaattgagaccttaataccagaaaaatatagtatttctttgtacagcaagaagtgggaaaaattagttaataccttttctaccttaaggtgtaattggattcagaaaaagactaacttaaagcaggaccaggcctgacatataaaatcctcacgaggtaacaagaatcagtttggtttgttcactgtcatttctcattataatctttgtcatgagaatggattcatgttgtgccattttctgttcctgttacaatctttgtcacatgaataagatatcaggatgttaatgcctggcatacagtattgtgtgtgttatgatactgtacaggactacgctgacctttgcaatattatgtattctgattggttgttcatgtcacctctttcccacaagttaataaggctgtaaaaaggagagaactgaaatggccagccagtcaaattatagaatattgaaaaggtcagagcagtccagcacagagaaaaaaaaattatggaatatatggtgcattaaaattcttgtgacaatgattgtaacaagaataggaaaggatacccatttatgttattccaatctagagaaccccataggatggtattctcgagacagcaatcatttacgcatccctgagtcatacatgtgaaaatatccatttatgctgttttttccttaaaaataattgcatagattttctactattcaacaaaaaagagcattgaaaataagattttcatctcagaaaaggggcattaatattgttaacatttcagttaagactttatatttgagactaaagaaaaggtttttttataagtaaaacctgttgttcatatgagatttatttggtctattttttcatgtaacacttttctttgaaataaaataggagagtaggactgaatgaattaacctttttcaagaccctttagaatgtgggatagaccgaaagagcagttaggagtttatgtagaaattctacatgatctatgcaaaacttattttatctttatgatgtgtgatgttggccaatacacaaaaaatcttttcttcctctgcatcttcagtggaaagatagtgacagagagaaagaggtataatacttaaatcagaaaccctgatgttattgttcttaagtgtgcaataattacttatttttcaaattgtttttatgcatattttaaattttcttgtagaacaacttcattggattttgtagcctataaggagacatctgttttaaaccttagctttacacttatttcactaatagagtaaacatgttatagtccaaagctagtcaaagctagtgatcccagcaccctatgctctgatgctcatccagtaggcctggcgtagaattcagatatatgaatgtttatgaggtaaccccaagtgattttgatgtaggttgtgcctggaatattggtattggcaacctcattttgcaaagagctaagtgagacccccagttaaagcccaatggctcagaccaagccacagagggtggaggagggcaactcaacttcaaatcacagtgcttgggtgggggcgaagcaggcagtggggagttgcggttccagaactcagaagcttaaaaggtcttgcaccatccacttatactcacaaatagggtcagattggagggccaaccagacaggaatggtcgcctgcgataggacacacttatcactttcacattttcaagcttgatttttgaggctgaaccaacgaggctgcattttccagcccactgaaagcccagtttatgcagtgaaaagtggcaaagcacaaccatctcaacaagaggaacctgagcacaagcattttaaaaatctacccctccccgcccatattgaggagcccaaattcctaaagttcaaaggaagaaaggaaagacagtgagagtgaaatggaggaagagctaaaatctgtggatcctgctttggttttgaatctggaaatttttgagcttcattgagggctgaaatcctgtcagttactctaggtctgtgaattgaactgtatgtttgtaggggtgagagaacattagactcactcagctgtatagttactggagatgtacaagttcttttttgagctgagcaaaatggttatgtaattgcatacttctcataattattgagtaattatatacttcttataattactgagtaatcattgttctataactagaacttaatgttacaactaattatataattaccatgtattaatgttgttatctaggaagcttagaatgaagtgctacttatatatctccccctgccatgccattttcaaagcaagcagtagtgtttgttttttgtttgttttacagttcaaaatttccttaaaaaacaaacaaacaagcaaaatgcaatggaaaaaacttcaccaatattatactcatacatatttactcattgattttgtatttgtccctggctgaaaatttgtaaaattatattctcatggcttaattttagaatttccattgttgctttacaaatttcaatcttttataagacctgcacagttacgctacttgagagtcaattgaatatctgcttgagtctataggacaagctgacctttttgaaagtttacaattgagcatgtaatgacagcagaaatacttccaaggagctcaatatcatggggacaggaggagatctccccatgctgaccatgtaattgttcttaggcaatggttaggatggtcatatttaatcttaaccaggtttcttgagtgcaagaattatgtcttatgtacttggggcatgttctcgtcagtgcctagaaaagccttctccttgcatgcagttggagctcaataatcttcagtagaagcaagctgactagttgtaaagaacctaggaaagctaaaatggcataaattggaaatgtctttttagtgcataatgaaattatcaaaggctgctttgtaggtttcataatgtcttgctaataagtattacacatatagaggagtgcattatctacttacattttaggaccttgaaatcattctttaagctatgaatatgtctttatctgcctttactgaaagtgaatagaaattatcattgtcacgttttagcccacaagcactgtttatttcctttgaagtaaactacttatttggatgtgccaattttgggtccagagtaataaattatattatgccattagggctttcttctgctcatgaaaaaaactcctgagtattttgtaacagtagatttttcagtgacttcctccatccctaaatggttataagtatctttttaaataactttttgtatgtttttacaatttgttggacctacccatatttcatgaaaatagtcaagtaataaccagatatcagaccctcttttgcattatttgatcttcattaatttcagtttgaaatataatctgatgggacaatgacacattggtaatggatgagattagtgctgctttattcattgaaaaaccttagaattttgatgaataatacattgttaggttggaaggggtagagaataggtaggtaattgctactgagaaaatgaaatacagagtacaaaattcttaatcacttgctagttctgaatggctagaatgtatcagttgtatggattacaacaaaaacaataacatcattcctagctgttgtttatgagcaactattatgtgctggatatgataaagaaataatctcacttaattttcacaatagcactgcaatgtaaatactgtattatcattcccagttcacagatgaagaaccagacattcagaaatattaagtaaattagcaaagagcacattgctaaagaatacaagaacaagttcaaatgcaggacttttgacaaccaaatttatgttctttcctttgcactatactttgctactaaactgtgttaaaatataatgtttttgtaaatattgtaaaccttgcattttgtatactatacgatgcaagatcacttttagtatgatgccatcttttactttttaagcatttgttcaataaagattatatcagtatctggagatcttgccagtatgcttgttcttctctttgaagctcaatatcatgtgttttttaattcatttgtctatatctgcagaatttgtgtgtgaaagattgaatgtacatataataaaaagtggttttatataggaaaaaggttatttgaagtaaatattggtgctcttttagataaaaaaatctcactctgtgacccaagctggagtgcagtgacacaattatagttcactgtaatctcaaatttgtgggttcaagtgattctcccacctcagcctcctgagtagctagaactacaggctcataccaccatgaccagataatttttaattttaattttttgtttttagagatgaggacttgctatgttgcctagcctgggtggtactcttaatcattcatttttctgttttttaagagttattgtatcatttctaaaagtgacaaacattaagcagcatttaaaaaattgtctcataaatttttcaggaaagcatctaatatagaaaatgttacaattttcatctgtagcccttttcttattttaaccctaattttttactcttaacctgaaatttaacctaatggtgtaagagagagagataaaacactgttactaggcagaagtattttcctgcattttggactgatgagatttaagaatgggtttgctaaagctttggaaggacagtggtgttgggaccagggtgaggatgtattaaaagtgattcttttatatagctaggcagcttctgcattttctcataaagctaaaaatattagatcttctgatcaaagtggacatatagtacctcccatccccagttgcttttcaagatattctgactaattgaaatttaaaagggcattagatagaaagaaatccacccacatttcaagcaaagtgaacagaaaacacctcagtttgtgaaatatacaatatctgacaaatatgtctgagtataatacgtatatccagaacaattctatttgaggaataatgtgttatttcttcctgtctgcacatccaaaaaaattcagggatttttattggaaaaaaaaccctcaaaaaagtataaacaactcatcaagtaatcaatttctacatttgtgcaatacttttacttatatgcttgatacttgtgatatggctttatcctacagttatctaagaatattcatcaaattatttcgattgccgtgatgaatgaattggccaggtcaactcagatagcacttttgttcacaagataataaaatccaaatatgtgcattgatagaagcacatgtaatgcctcttagagtggtaaagttacagacctatttggtacagtatatttagaaactcaagaaaatactcaaataatagcaggaatgaattcttaaatatgtatttattttaataattttcttttttaatcagtaggtaataactacacccttctgaatgtcacaaaagtcatgtacagcggagaagagacaaacctttgggtgctcatcgatgggctggttccttttaccaactatactgtacaagtgaatatttcaaatagccaaggcagcttgataactgatcctataacaattgcaatgcctccaggaggtaagtctatgcaaatgttggctatctaattttatataaatgccctagaattaagtttccattgaataccttgtttatttttagaggtattttattttagaacttagaggctcaattgtatttctggttcttttaatagttgttgttttgctttgtttattcagattctttaattgacgatcttttattgttttgttgagactgctttcatccacctcacactgtgtgtatgtgtgtgtatataccatacacacatacacacacacacatatatatatctggatttctgcatgttaagaaaattgggaaatgattttgttcaaggcgttacttaaagccaaaatttatatttgcaatttgagcttccattttctactgcaaatggttctcattcctggtgttctaaataactagttcaattgtatacttaaagtacttcatttggcaaaaagggcagggtgcagatgatagaataggaaaattccatttgcactactggaaaacacctttaaattcctgatcctaataattacagttcagcagggccacattcatgtgtgaaatgtgatacagtctgcatatttttattttaaatatttctataaaaatcgacctattcacaattaccattattttgatgtgccttcagcttcaccatgttttaactcgttgcgggaaataatcgcattgaggaaaacccctctagggttgacatggatggcccttgaacagaaagcatgcctcaaaatgttaagagcatgactctcaattgagtgctaaagaatgtgtgttttctgaaaatcctgaaggcaaaggaccccaggacatccagcatctgccctgtagcccatctcccaggaatgagtatattctgaactaagggagaatgtcacaatcttttatcagcaatccgaagggcaggttaaccccacttccagttatgaagagtataagaacacaaagtgctttatcactggagaaaaataaaagggaatcttcagtttgtatggaaccgctcccctgcaaaaaagattcattacttgttgtatcataaaaccacacactattatctaccttttatgccattattaaaattaatgaattgatgtttactaaaatacttgaaactgtaaatgtcagaagctacattacttaagaaaagaatgcataaaagaaacttttgaggctgatcaactcaggttagtatcatatttattgagacaataattttaaaagggaattgaatttagatatatttatttaaaaattgagactgaaacccaaaataaaacaaactccccccgctaaaataaaccttaggtattcatatcttcatttttcacttcaatacacatgctaggaaggatagaaaactgtgatggctctaaaccttagaatataatatcctttactcaaatttagaaattaaagagtaatcagtgccataatggaggttttaagttatatagtaataccttttctacaggatatatacaatatttaataagcgtgtttattttagggtatttatactgattaaatagtttgtgatttacagtaatttatatcatattcataaaatagggcaaatttaattcattgtttatgtttttaggaatgtatggtctaataatttgttatttatacatatatcaagattcaattaaaaatagcaaggtcctactgctaacggaatatgcgctatgtgaatatacctgtcagtaaaagggttaatattatacaaatagaaagaaactaaaatattgttttatagtggtgcagtcaaactgagtaaaccattaactgaggcttatcttcatctttgctctgtggatgcttatctgtgtcattaccataatgcactgcaggcccacactctctgggcctgatgcaatcctccactttatgtattcagaaatctagaatttgggagtcagtccttcaccaaagaggaagcaaatgtcttcaaagacagacagtgattcgctaaagtttattatggccattaggacatactttcttttttcattagattgttgttgattacaattaggaaacgtatagctttaaaattatcttttttatgaccttgtggcagtttaaaggtgatacctcattgattaaataggttttagttcatgcttccttttacttaatgatctgaaaacatattatcctgatttacacataaaaatcatgctgaaaagcatgtggcattcactagaatatgtgtgtttaagtagaattaaattagtactgagagttattaaagaaatcttccatgcctttgtccagtgaactgtgtttcattctgaaatgaataataaatggaccaatatacggaggcaaaccaacttatgggcagagaaggttctatatgctatttacttttccattatagttggattgttatcattattgccatttccttgatttcaatattagatctctcttatggtgatgttgaattcctagtatctttcaatgctgggtgatgcaagatttgtgatgataatatccttagctatgcttcttttgcatacttttaaaacataataagaaaagagttgggcaaaataaaatgctcttttttacttcatcaaatatttgctatcaaatatgacctggaaaatcccctttacccgtttaatctggccaaatcctactcattttttagcctcaaacctagaaattggtctatcagaaagtcatgttttgccaacagaggctgagatagggcctttctgtatcccagagaacagttacattatactgaaattgcctgtttaatctgtcacaatcactggttataagatcctatagagtaggaactgtttcttactcacatttctatcttcagcacctagactaaacctgacacatggtaggtgcataatgaataattggtgaatgaataaattagtcaagattgcttaacgacttgttttaaattttaagcttattattactcaggccctccaggcctcatctcaacctcagcaaccttgtattttagccagctgtgaaagagaccttctctgtacaccactgtccaatgtaggaatgctctggttatgtagataaaattgggagctcaaactgtaaggagggtgagtgtattggaggtgagaaatattctcaagttatgccaactcttcattcttttattcttccctatagtggttacttttctcaggtgagcatagaataaacaatccttagtttagatagtaatttggaaaggagaggtgaaagggtcatactccaaagaattttaccaggatacatcatctcttaatttgtagtcaggacacatcttatttgccagtcctacctctatttttctgatgagaaaaaatatataattaagaatatgataaacacaagttatttgaagatagaaattaaagtaagaagatggtgctactaataacttggcacatagatgaacagtggcaaatcccaattaacacacattttttatttgaaaaattcactttaaatattatttggacaactggaggggcgtctctgttttttccaattatgtagcagatccttccctacttctgcacactcaagttttttgtatttctacaattactatatttttaggttgtttgtaataacataatgctcatatttagcactaaggtattcttggaaataaaggatatatttaatcagagctcttgaatagtattatggtacaggttcaagagttctaggaaaagaattaaaaaaataaaaacgaatccaaatgttaatccataaatatgaaactttcctatggcctttaccccttcaaggtctggagttactaatggggttaggatttcaacgcttaatggggctcagtgcattagtgttttgtatgcatggaattcagcattcagtttaataagtggttgacattggtgatgtcccttaatttgcttaaatctaattggctcttttatcagtcaaacctgtatggattggcaattgatcagaaagggtcagccatgactctgcatgtagttaaatgatggaagcaccagttaaagtcacagttgcatgataataagcaaaagaagaacaaatgagcttagaggaggaaggcaaagaagcttagaagttttgcaggatcttcaagttcagaacaaaggcattatagagtatataaattttaaatacactgcattttgcctccagacttaaacctttttttttccagatgaactgaaatcttgtctgaaactgtctttgttacatcaaagaactactcagaaagctaaaagagacagaagaagcataaaagggcatagtttaaaatgattagtgacaaattccatactgacgagctagaaacagatttttaatgaaagttttatattattccaaaaggaataattctgtttatctttttctgaactgctttattgtaacagtgaaaggaacttggagccaccctggtttgtgaacctaatccaattttcctctgagagtaaataatttgtcatttgtacttttaagttgatgagaattattataatctacaaacagtgtaaaatactaggcttgagaaaatctgtttatttgcccaaatgtgttattagagaaccaaaaattgaaaaaggcaaaatggttgcgagtagtttgttttacagggtcttttcgactctctctccttcccctgaaccccctctccacttatccacctaaaatatcaatgagaaaaaaaagaaagaaagaaaaccattaggaagtaaaacttaggcacatcgcaaaagcatagacgttggagtcctagaaacaaggatttaaatccacctctttcactcactgcttgagtgactatgagcaaatctgcagatataactgagcttcagtttgctcatccattaaagaggctggatggtaattcccacctgactggaggattgaacaacatattatatgtaatgtgtttagcgcattgcctgtcttggtaaacatttggtgcttcctacctcttttgttctattttcctactaagactctttttggggacctggaaaatgccctatagaaaaagtaagtaaaaaaacctgtctttcacatagactgcagagaccagaataatttcatcttgctacatccctatcctttcctacacttaccccttaacatgttgacatacatatggccaggccagtaaccctgctaaggggtggttgtgatgcatattagatgatgaagtaagcaggaagcatgggaagtgattttctttttgaaataccttcagcatcctcctccatgacctccagatcataatttgcgaagatttttacatcaagctctcattggtcatcttgggatttcacatattttcttaatagaactcttcttctgtgtttatatagagctacttattaaatataattatgactttttaaaaaatgtctattattgtatattttattcacaaatgcttttttttacattgttaatgctagcccaaagcaagtaatttgaaattttatcctaagatgttttcatgttttcttaattgtcctcaaatacatatatttaaaagttacatcttggaattcaaactttttttcatttttcactaaataggaaagtttactagttgttcagccaatatgcttttgaataactaaataaaatgtttgcttttaaaagatgttagtatatgatttttgcccaataataccactaaaggaataatatattaatgactaacttttttagcttgaactactgaattccattctgtttagaatttaagagactggaatattctttcgggtattgctgtgtaacgagtcactccaaaagtcagcaacttaaaacaaccattctgtattatttctcacctgattgtgtgagttgtcagcatggttctcctggcttaaggaggctggactgggcttcttcagaattcccagaaagaaactcagggtttcaagagtcaagccctagtgtacaagccctgaaaacctttgcttgcctcaaactgtccaaagcaaatttcttgcccaagtcaaaaagcatgtatgctggaatgtatgatttactggagcctgataatttgtcaatcttccataaatgtctaagtgattggtttttagattgtgtatgtgtatatgtacaaacacatacatgcaagtattacagatacataatttttcttttaaattagttctgcttttgaaataatgatgtactagcaccaaaaaaaatgaagaaagcagtttactaaatttttccttgaagaagatataaaaaaaaatctttccttacatgacaattaattttgatgttttatttcagtataaagatcaataaatgtatatcaatagattcttgtttaaaatgtttgtagctccctattggagggaaaattctgatctcttcttataagtaggtgatttaaaaaaaaatcttagctatttctcaaatctaggccttgggtattctgatttctgcttgtaactttgaactgtgagagtagaaactgtgtgtaatttgaatattttctgtagctccagtgtctggcataaactatttgctgaataaattaccagagccctttgtggcagtgataacttggaaaataatcctgaaagttatattttgctattgctgtgtcttttacttggataaacattttccagaattaaattcaacatttagggtttaattcatcctaaaattatttttagtcctgttaagattaccataacagtgtaaaaatacataatataggaccctctggaggtatgtttataaatttgtgtgtgtgtttaattgtctattttacctaccattttattttttatttttaaataattccatcttttatattatgtttaggggtacatgtgcaggcttgtcacatggatatattgtatgatgctaaggtttcaggtatgattgatcctattgcccaggtagtgagcagagcacctaatagttttcagttctttgctttctcccactgttccccttctagtagtttccactgtaaccaccattttcaattaacttatctattgtgattggtggttgaacacttaactgaaaataatgattaaaacagaacatccaaaaatttaaatatatattaaacacaactttaatttagaacacataaatatatttatctatatatttatccaacaatcttgttatatagggccaagttgttttcttggagtgttaatttagtatttataagtccagcatatttgctgccaaaactatattcataatgcatagtttgatttccactttgaaaactcctttaaaaggagaacaaaaatttagagataattaaggaagaatctaattatagaatttttcaggcttttgtaatatcctaagtcttttagttatttttcctgaacgaatttcacagtattgttttattaagtcctcactgaaagtttttcaaagcagtaaattttcatagaaaacggtttctgttaacagtgctcatcagtttaagcattatttaattaaatgacataatcataatgacaaccacaattgacatcacaggtttaaaaaatacagctgactctttgtgagtgtataattctacctgcgactgcagaatgttgcccttgaactacagagtagtcaactatccatctctgcaatacagagtaaatgtaaattttttattaatctggcaagtcagataagaataggtaggtaaggctgggcgcggtggctcacgcctgtaatcccagcacttcggaaggccaaggagggtggatcacctgaggttgggagttcgagaccagcctgaccaacatagagaaaccccatcgctaccaaaaatacaaaaacttagccgggcatgttgtaattccagctattcgggaggctggggtaggagaatcgcttgaacccgaaaggcggaggttacagagagccaagattgtaccattgcactccagcctgggcaacaagagcaaaactctgtctcaaaaaaaaaaaaaaaaaaaagataggtaggtaaagcaagtgtctactatttaggaaaaagacacgcttccaaagtggcagaatgatccaccctcagagcagcctacccaagtaggagaggcaggacaatgctaccaaattcttctcttaggttaagcattaccacagctctgccttaaaagaaaaaagaaattattgattatatcccttcaattgattagggactgagtctgagatttgtggcataacttgctcagtgaacttatttttctccttcagtttttaaaggaaagaactgagctttctcttctattttcaaatttcaaccaaaatctctttctaagaccttagagcaatgaaatgtgtgggtagcactatcaaccagccaggtggagaatggtatttttttttttttttttttttttgcagggtctctaagagaattaggggcaactagaactggctcaaaaagcaagaatatacgaaagagcaaaagagtaaataaataagaattgcaaaaacaaactctattgtatcttgcactttcttcatgcattgtagcactgagaattgtaaaatatttctataccttttgtttgtttttgttcttgtttttttgagacggagtctcgctctgtcacccaggctggagtgcagtggcgcaatctcagctcactctatgccttttaaaatcaacttagtacaatgtcaagatgctactttttaaaaataaaactaatggttctcaaaaatgtgaaagcttgcttgccgagtacagatataaagctcctcaatatgtgttttccatttttcatctgctctgtatccacttagatttatttgaaatatataaatagaaacattaatgtgcaggtggcaatgggatatcttaaaaattgaaagagtacaaagggatggagattttaaaaataaacgtaggttagcagctgaaataagcaataggctaagatggtatattcccttattcagagggtagaaggaaagatgagattaactgctttttataatgtaaaagccacaatgaagatacaggatggtgaggaatagcattctttaaaacgacaacattctaccacataaacagatggtttgtctttaccttcagtatattaaaagctacacaatttatattacatccagttcatatgaatctttcgaatagttgtgcataatgttttacttctgtgtatatcttccaaatgtgctgctattttttccctggaaaaatcaacccattgaaagtaataaagtaggagaattcaacaaataaaaagtatttaaattcttaataaaataaatagtgtgctttcaaaaacacataccaggccatttaatttaacccatgctttctcccaggtacgagaatagaaccaaaggatttatgactgtcttaaacatgctctcaaatcctttcctgaaaagtgttacctttacttttttggaattgatagtttaacctgctttgtgtgtgtgtgtgcatgtatgaagaggtatatgtttgtaatattacatatcataagccaaagagagggataaattcctgtttcataatttgtgaacaattttttcactttttgtattcaccatcttgacaatgaacttcctgcttataaaaacaccttagaaaaagactaacttctgagctatggagaagagggaaggaaactttgaagtgtgcttactatggactcaacaagcctccagcaaagggctgccagctctccatatttgcatactctcatgtggattatatagaaatacacacgcccacacacacaattaagtgctatctttaaagcatcctggggcaagagagagagacttaaaaaaataaaataaaatcacatctttttcttttttaccaggggagaggggtgggaaatattgttcctttaagttccattgatattttctaactcacatttttaaaaagaataagtacaattcattttctttttttttcttcgaagacggctttatccataactttaagcttaaaaaaaaaaatcatgtctgtctgactgacactgcagtctaaaagcaacttgaagttttatttgaatttttatagtgccctaaagaaatttttgctttatttctttaaaataatatcttgttcctcattttttcatagacaaactgtatgcctgacttgcataaaattctatgaacatttacctgcctatataaatactcacaaaagtgagaaaattcttaatatgtcttagatacttagagaccatatttccaacctcttttcatcagcagcatcaagaaaatccctttttctatctctataaaggcatatagaccccccagagtctaaaagaaaacttaaaaacttaaggaagaatagattttgacaacagtagggaaattcacttacaaccactatgcttttcatgattgttaattaattgggacaaatgaaactagaaacatgagggtatctaatatatactttattagattaatccctcttacactttgatgaccattttcaaatgtatactatctttcatttttatttaaatgtttcgtatgcttgtatcatgtcttatctactagatggggaagataaaacgaatgggctgggtgtggtgtctcacacttgtaatcccagcactttgggaggctgaagtgggaggattgttgagctcaggagtttgagaccagtctgggcaacatagtgagaccccatctctatttaaattttaaaaagaagaagtaaaatgaaaaaaaaaatgagtgggtgaatggaggtagacagaggagtcacagctggtctccctttttctttctctatccctctcaccatttaccttggctcaggcatataataggatattagtaatgattactatcatgctcttgtgcagtcctagtggcctggggctatttttgcacccagcataccttcaccctttcttttgatgacagggctccaatttccctctcagcaccctgggctctttcaagatcagaacatgcacatgcgctgtgtgtgaagttgactgcatcaccaggtctgaccaatgaggacactgtattctcctaaccacagtgattttttttcaggaatgacaggcattccaatcaaagccactgaattgcagtaaaccagtacagtaaacagaggcatgtctcttgccctgtatttgaatatgggattcggctcaatttgctgccagccatgttgcccctcaaagagtctgagaaatttagtcagcaaggaagaaagcagagtgggtatgagagaaggaggtagactagattctggtgacgtcatttgatcctttgaatccagcattgccaaaacccagctctttcccttgagtgtttttttgtttgtttgtttgtttgttgattacaggaacccactacccatctcattgcttaagcctctatgtgttgtgttttctgccacttgaaaacaaaagcatttgccacaatgcttgagagaaaggaaaacaagtagagagcatttagagaagtctcatcacttcctgaaaatcatgccaaatgctaaacttaacatatgtgtttggcttttgcttgggctctcaaattaggaaacctcaagaagtaagctggatgtcacatgagataatattttctaaaactgtgaaatggctcatcccattctgaagggtctcctcagagccacttcatttgacaatcttctgagctgtttctccactattttcaggtctcagagccctgagttctagtaataactcttgtgctaattagctgtttggtctgacttaagtaactttacctgactatgatgttggtctcttatctctaaaatggcagatgtgaattagatcagcagtatctatagtgtgatcccagaccaggaacttcaacattccttgaaatttgcttgaaatgcaacttctcaaaccctactctcaacctacttaaccagaaattctgagggtggggccaagcaatctgtgttttaatgagattccattaccaactcccaggtcactgggtgccttcacaagtttgaagaccactgagctagaccatctttaaaatactttcaaagaaaaaatatatgatcttgtctatgactttattccatattcatatttgagacaaatactcagggaaaaataggtataataggcctccatgctcaactggtctttgaatatataagtcacattcgtagggccagaggtctttccaatgtaagaaagccatcgtgttgctcacagtcttcctgaatgggccaggaacagataccaaagataaccaattccagatgttgagttctacctgtggcaccagaaagcaacaggcatgatgttttatgcactggggaacactaatcagccctactgtgaagacactgtcagctaaatttcctttgctcttcaacttcttcacagaacatctgctataagaaactccttgtaactaaaacctgagtctttcccctctggggaattttctttaatgagcctcttgtggctacatctgtacagttttgaaatatgtttcctcaagtcagttacatcttcatcctggattctagggtttgctgtctattggacctcatagctaagatttttccttctaggagttcacaaacacaactccagagtaggttgacatagtgcccagtatctagagaaaaattaagatcatgtaaccttttatttgctaaaaagagatttttgatgttgtgatcactcataccaagatagcatttattaatactaggtgcaggtgtggttttgcatatattaactcattttattctcctcacaaaccctgtaaggcaagtgctattattatccctatttacacataaggaagttgaagaaacaatattggcttgcaactagtaaaggtcatcttactagtaaaaggcagacactgtatttaaacctagagactgactatagaagcctagttctgagccactatactctattgttctactgactgtagaactatactctatttcttctactgactgttcatatgctctcttggcagcagcaacacagattttgatgccccactaatcaatgcagatctgaagaggtgacttgactctatagtagggtcaaatataattttaagggtattgttggttgaactagtaggtttttaaatcctgttgcagatggcctagagaactgtcctcagtgactgtataacccatgctctaaagtttataatgtcataagagaaaaaaaatgtaggtaaaacatgtttacagccttacaaaaaagcattaagcagaagcaatattatgtggtacgtaccctgtgtggagaaggcaaagaaaccaaccagttggactcatcctttgccagtgtggatataagtacttaacttgcccaccaagtattttgcccaacttctgtcatatttacctatgaacttctattataaattattataaattgtgatcttctgattgtacatagtttgcattcttgtgaagagacttaatttatctaatagtgttaattttgaaaaattaacaaactttcttaaaagagagcaagaaaacttatatttgtaaaaactaatgaaagaaagaatctttttcttcctgtactaaaacaattttctgtgaacagttgaaaaaacactctagtcaggtgaagacacttattcatatgtggaatattctagaaataagccatgtgaacagtatgagtatgtgggaaaattgttcactggaatggccacaaaatgaccatgcgtgacctctgggccataagaaagcaggaatactttcctcatcaaaatctgaagttgagggcatgatcacaggaaaaagcttaaatcttattcccatggttgatgctataaatcaagtaagcgtgtatcttagactgtgcatttgtaaagcacagtgtctatcaaaatatcacaattcaacttatccaccacttgctatccccagcattttcatttcctgattgtgtgaccttgagaaacttttctcctctctaagcctcattttgctcatctgggaaggggtttcataattacagaactttcctcaatgggtttagacaaggaataaagaatgtgtgtgcactgagattagctggcacattaggtagctgctcaattctttgtttaaaggacataaagcatgatatataaatacaaaatatatgtaagcttatcactattcagttgaaaattaacctgtaaacatctacatttttatcttctttgatgattccaacagctgtctctaaaactaagtgtaaggaaacagcagactggttgtggcatattaaattataagtgaggactaatttgaggatcaaagatgctctttgggagatatcgcctgactagtaggaaaagcattagctgtctccctctgtctcatgtatttgttctctctgtcttggaaatatccttccccacagtttctgaatcttgatgtttaattgaacacaaaggtctttgagaaacacaacagggggttgttcctggtagttctagcattgaggaaattgaaatgtacattttttttctcatttatcaaagaagggcaagaatctaaactgacattttatatcaaatgaattatgaactgtgtactttgtacctaagggaacaacaactaaattagagttttagttaagagagagagagagacaaaaataggctttgaataaaacatacagtaatttctgctactgtgcctgacagtgacatggccagatacagttctattgtagaactagtgactggatgcaggctactctgaaatctttaaatgtatttgagagaccgtctcagaaaaaattaaacctaaatttcttatgttgttagactttatggtcagtgaaatagtcttgataatctaaagttaactttcagctttttatcaatgcttactttcttaaaaaaaataatagttgcaaagttttacttcttgagaaagtatgaaattataggttgcttgagagggaaaatacaatgcagaataaaaataatatatatgaaaatgccacattccatctctcctctgattatctgtaacacctacacaaatactacacactacactcatatgttattgtgctcataaagagtgtgaatcctaagatcagtgggacttggttcaaatcttaatttcccccctcctactagctgtaagagcttcggcaagttatacaatcagagtctgctttactttgttcttctgtaaatggtagtaaataataagcactatctcacaggattgacactgagaacttaattatgatgatgcctgcaatagatacaacgtgatgcagtacacatagtagttgttacgttgcacagttgtttccttccctatgtgagaagattaggcagcagcaaattagaactccattatttaatggctgctgattcctgaagtataggaagtattagaattaaaattttaaggagaaggaccctataatgtctgtgcaatatatctaataatcattttttaaataaccaattgaaaattcttgggaattgggggtgattcatgctttcttcttctggacaaagctatgtattgattaccatatttttcttcacaaataagtattccaatttatgcaatataaaaataaaagaagcgttattaatatgaatacatttgttttagacttctaaatccccctaggttcataaacctaaaagtgacaaaattccttgatattaatcccatatgctttctgatgccaatgctatactggataataattttgtgactaaattactagaaacaaataactatcactgatagcctgattacaaattttcttcatataattattgatcattgctgtggtaaaatgaatatcataatttttattctcaaatgttgattctaactctactacttataaggtgaaatcagttcttagaagtctttcagcagtttaaattctgccaatgactattgttttattcttactaatagataatgtgaaattaatggcatgttgaggtaagggatgctgtcttgtccgtttaggcggctacaacaaaatactatagactaggtgccttacaagcaacagaaaagtatttcacacagttctggaggctgggaagtccaggatcaaggtgctgacagattcagtgtctagtgaaggctcttcttcatagacagtcattttctttactctaacttcacatggcagaaggggtgagaagtctcccttgggtctctattacaagggcactaaccgcattcatgagggctacaatatcataacctgatcacctcccaaggctccatctcctaatattatctccttggcggtgagaatttcaacgtaagaattataggagggacatagaccatagcagacaccccacatttaagtattttaatgctagatctagttagtatttgagtaatttaattaataaacttgaatattatatccaatcccgttgttacaatgacttttataaccaatctgctctgattcttcaatcattaaatgactaaatttttctccactattcaaagatcacttaatttcttggtatttgattgtatcttagaatagtggattcaatggcaccatagaggaagagtccaactctaaaatataatggtttattttctacacgacctcagtcattttttgttttgtttttgagaaaggctctcactttgacaccctggctagagtgtagtggcacagtcacagctcactgcagcctcaatctcctgggctcaagcaattgtcccacctcagcatcctgagtagctggcaatacaggcatgcaccaccacatccagctaattttgtattttttttttttttttttttttttttgtagtgatagggtttcactatgttactcagactcgtctcaaactcccgggctcaagcaatctgcccatctcagcctcccaaaatactgggattataggtgtgagccactgtacccagcccctcagtaatttattttgctatttttcttgttggatacattcaacaagggataatttaatgcagtcttcctgaaaagagtggctttgacttgagcttgaatttatttattgttaaccttgctaagcatatcaatttttaatttcacaaagactaaattcttcagtgaattattttaaatgaagtcaatgagcaatattagaatcaaaaataaaatagaattaattgaacagtattgttgtatatattttaaattatttttccaattgaagatatgctttaaacaaagggctcaagcaatcaggtactcaaggaaaaagaatttaatctatgctgcctagaaactaattggatgaatatgatcgtattcaaaataataggaatgctaagaaatgctcttaggaatactaagacgaattcaaatgtcgaaagcaaaggcttaactagagtgtctaaatgtaggaagtctctgtaaggaaaaggaaaaaaatttggttggtggtttgagacataacaaaaaaaaattcttctgggcattatgaccaccaacttcagggcctctaattagtctgacaaagtgacagttctacattctagttgaacaaataatgtatctaatgaaattcaaaatcgctatttttctctgagcacagtgagctgcatcattcacagctttggggtatttcaaaattaacagaggatgacttcagtctgtctgatgtttcttggttaacaaattcactgaaattgtcttgcagagcaattttaagcaattctttaatcttaaaccacaaagagaggtggaggtggaggtgtattaccttggtcctatggatgctaatgtgaagtggaatcttttatttctcaaaatggtcaacagcaattagtattcagtggtgtctttttattctggtgcccttgacccacctctgcccccctttctatattactcctattatatactgtaactggggatattcttgcttcttttccattctaattaaagcattcttagtgaacatgggaaccatttttcatttcatgaagaataattactggacctaggtgaaatctgcccattgggttttatataatttttgacaaatatttgcacgaattttgactgatctattcttaccatttctccgtgaaatgttggagaagttttcagttccctcagaacaataaacctaaatatgtacgtgaaagaccaagataaatgttgtaccaccttcaggttgtatttgctaatgtactttaaaatattttattttgtcactaatataagaaataatgatgactttttaacaatttttttttttatttttgcacatgtttctttcctagtcagagtttgacctaaatactcttctactacactagtgacaaccttgagaaatatcatttatttaggttggatctgtaaaacctatagctcttgttatacatcttgtttcttttttttattttattattattatactttaagtttcagggtacatgtgcacaatgtgcaggtttgttacacatgtatacatgtgccatgctggtgtgctatacccattaactcgtcatttagcattaggtagatctcctaaagctatccctcccccctccccccaccccacaacagtccccagagtgtgatgttccccttcatgtgtccatgtgttctcattgttcagttcccacctatgagtgagaatatgcggtgtttggttttttgttgttgtgatagtttattgagaatgatgatttccaatttcatccatgtccctacaaaggacatgaactcatccttttttatggctgcatagtattccatggtgtatatgtgccacattttcttaatccagtctatcattgttggacatttgggttggttccaagtctttgctattgtgaatagtgccgcaataaacatatgtgtgcatgtgtctttatagcagcatgatttatagtcctttgggtatatacccagtaatgggatggctgggtcaaatagtatttctagttctagatccctgaggaatcaccacactgacttccacaatgtttgaactcttgtttctttatttttctctagagtcctttctcagagccaagggtgtcttgacaagtaaaagagaaaaaagttactaaacagagagaaagagagagtaacagactaagaaagacagagacaatttcttcaaacctctactccaaaaaatcctcctcaaaatttaaacgacacatttgtttaaaacctcaaaattcttgcattctttcaaaacactgagctgttagattctaccaacagtatccgctctccaagttagttctttaggttcctgtgtgttggatggggaagaggtagggaaaggaggctagctaccttttatgtctgtgaggaagggcaaaggtctggtttggctaattttaaacaacattgtttaaaataacaggaacttgaactttggagacagttgctagattcaaacagcagcacaaacccctcattacttgtgtggtcttgtgcaagtcatttatgttatgaagcttcagattccttgacccacctacttcacacctaggactattaggaggattcagtgtgatgatacatacaaagcatttagtccattgcctggtgtacaataactgcccagcattaactctgacattgtagtgtgcttatgtttacaaatgaatatcaagatgttagcattgttcaaggggcaattaaccaaagtcattcattaaagttgttgagttgtttaataaacaactcaattaacataaagactctttaccaaaactttgaactttgttcaaatttcattcatccaaaagcagttgctgagctctttctagccaccaggcataactctaggtcctgtgcaaaacaggcttttggagcagatggcgtgcattccctgatggaactgaaggccctggccaccattgtggtgaagttcataactgcacttactgcatgttctggctggctacttaagaattccctaaggagatattggatagatcaaggtacttagagcttggtttcaccttctagggggagaaagggttgctcttaacaaaaactaggacaataaatttaaatgtgtttataaataatgatgtaagacaactatgtcaatgttgttaaagttggctgttacttttaagtacaaaattgcatattccttatttggtgggattactgtacatagttatttttagaaatcagaaaagttaattgatttactgtgattctctcgttttacaaaaatgcaaattgttttattatataagaagagtccattttagaccaaattcattcccataaaatgaaaacttcttggaaaaacaacaaaaaagaactttttaagaaaatgtattgattggtaactcatgacatttcttttctgttttgctttttggctcctgtgaatctcagaaaaaaaaagtctgttgctactcaggaggctgaggcagaagaatcgctcgaacctaggaggcggaggttgcagtgagcagaaattgcaccactgcactccagcctgggtgacagagcgagactctgtctcaaaaaaaaaaaaaaaaaaaaaaagtctgttgcttgacaatggctaaccttagtagaggttttgtggtacagttcactgatctttttccttcattattcagctttgttttcttgagttttatattaaatgtttttaaaaatattttggtaattatgcaggttaataaattataaaggatatctatagttttccccatctctttctggcattctaatgacatgaatgcagattccttattgatccatataagaatgagctcccagaagtgagtgtaatggaatcaagtagccagaaatacttagtaattggattgtttttcacattctgcactcaacttttatggaaaaaaaaaactcgaatcaaagtatatcaataagatgataaatccattcattccttttcagtatccagtccagtccatttaccagggagtagccaccaccatctgtgcctcaatattttcaaactaaacaacaattgtagtttctgtgcttaaaatattgatggaattagtgattccccatctccttcgtatacatttcagactctttatctgtcctacaagaccagtgtctcccacccttgctgccttgcttttaattcctcaaacagtgagatcaccatagagcttccggcccataacaggtcagcaaagtcttagtcatttaacaggtccaaacttaaataccacttccttagaaagcctttcttctttcaaccaaaattaagtcggccccctttaatgatacctcttagcacctctgttctccctcctagcactttgtgtacattttaactacatattgctttctatttgtttgatgccagtcttgctccacttgacaatattctcatgcccataatggtgtgactctggctagtttgttcttcattatgcacccatcacctggcacgatgcctggcaagggagtaaaggaggatgggtagatcagtttttcagggaatataaaaatgacagcacagttttatcacaaatgtttaatctttctgtatttccatatttatagcttggagattgcatagtaaacaggaaagaggatgaggttttgaatcaaaattctcatgtttgaatcccagcctggcacttagcacaatcacaaagaactgtaggaggaatgcaatactcacatcatctaattcatggtatggctgcaaggccaaatgagaaaaatggagatgcattcaaaaggtgagagctacatgagaattcatgaacacaaagaagggaaaaacagacacagggcctactcgagggtgaagggtgggaagatggagaggaacagaaaaaataacctttgggtactaagcttattacctgggtgatgaaataatctgtacactaaacccccatgacttcagtttacctacataacaaacctgcacatgtacccctgaacctaaaataaaagttttttaaaaagtaattgaaatgttcgtaactcaaaggataaatgcttgcggggatggataccccattctccattgtgtgactagttcactttgcatatctgtatgaaaacatctaatgtacttcatatatatatatatatatatacacgtatatatatatatatatacacatatatatatatacgtatatatatatatatatatatacacatacctactacctaccctcaaaaattcttagaaatttttttaaagaataaaattagacccctatctctcaccatgtacaaaaataaaatcaaaattggttgaaaacttaagtcgaagacttcaaactatcaagttactacaagaaaacattggggaaaatctataggacataggtctgggcaaagatttcttgagcaatatcccacaagcacaggcaaccaaggcaaacataggcaaatgggatcacataggttaaaaatcttctgtacagcaaaggatgcaatcaacgaagtgaaggaacaccccacagaatggaagaaagtatttgccaactatccctctgacaagggattaatcaccagaatatataacaactctataggaaaaaaactaataatccaatcaaaaaatcagcaaaatatttgaatagacatttctcaaaagaagacatacaaatggcagtcatatgaaaaggtgctcagcatcatcaattatcagagaaatgcaaatcaaaactataatgagatttcatctcaccccagttaaaatggcttatgtccaaaaaacaggcaataaataacaaaagctgtcaaggatgtggagaaagggaacccttgtaccctgctggtaggaatgtaaattagtacaaccactatggagaaccatttggaggtttctcaaaaaactaaaaattgagctaccatatgactcagcaatcccattgctgggcatacacccaaaagaaaggaaatcagtatgttgaagaaatatcttcattcctatgtttgtttcagcactgtttacaatagccaagatttggaagcaacctaagttgcatccatcagcagatggatggataaacaaaatgtggtacatatatacaatggagtactattcagccgtagaaaagaatgagatccagtcatttgcaagaatttggatggaactggagattattacattagatgaaataagcctggcacagaaagacaaatgtggcatgttctcatttatctgtgggatctaaaaatcaaagcaattgaactcatgggtttagagagtagaaggatggttaccagaggctgggaagagtagtggagggttggggagaggaggggatgcttaatgggttaaaaaaatagaatgaatgcataagacctactatttgatagcacaataaggtgattatagtcaataataacttaagcgtatatttttaaataacttaaaaaatgtaattagattgtttgtaactcaaaggataaattcttgaggggatggataccccattctccatgatgtgcttgtttcacattgcatgcctgtatcaaaacatctcatgtgccccaataaatatacctcctatatgccacaaattaaaaaaaaattaaaaaattaagaaaaaaattgttctcaagtgattaaaactaagatggctgggtaatttaagctctgtattgggtataagcagaacatactttttctaaaccttgtgaattttttaagtggttacaaaatattataggatcagactttgtaatttcataaatattattattacaaataatgtatccagagcgatctcaattatgaagtcatcaaggatgggtaagaaaattacagagagaagcaataaatctgaatgtacagtgcttatcttcaagtaacttaaaaggaactatgaacaaatgttcatagttttttgggatacattaaatgacttagtgatacttaagaagatactttgattgatgttactaagaaataataaatgagtaaagcatgattgtagttatggtgtgagtaatgatatgacaggatcatgtgatagacattgggggtaagataaagatcataacaatagcaaacacttatatagtacttatgatgtgtactttattatattatgtatatattatattgtgtaaccacttgatacattaacttatttaatcctcccaaccacactctatgaaatatataccatcttaatctttctttcgttgatgaagaaactggggcacatagagattttggtacttgctcagtaagtagcacaatcaggatttgaacccagataagttggctcttaaccaatacacagatctgcctcttttgtgatttaatcaaaataaactctaaataaagacattacaataaagacattaattagctgctaatcagctaattaagttaaaaatgtaaaaagtgctaattgaacataaaggagagtgacaaaagtgtgaaatgttcaggattatctaatataataaaaagcttatcaaaggtaaaaaagttttcattggaaaagattcatgaacaagcattctagaaattaagaaatggtaaatggccaataagcatgttgtaaatatttcaatcatagtcttttggttttcagtgctatctatagactgacaccttccttatgtatatgctcaggcctaaacacatgaactccagtcccccgtagtcaatggccttctaaaaatatcttaggcaatccagaaccaacaaattttttttcttcctacaccaagtgtccctcccttagaccagaagcttaggagtcaagcatccttctttcattctctacatccctacatctgttccatcaccaaatcctctatgaacaatactttccagactcacgtcaatgaggcttctgccttgggtctgcttcatttgtgcttctcccagtgatctgcaaatctcaactcagataaaacctcatcagagatgccttccctgcctatcgcatctaacatgctaactttgctccactccctccctcatcactctcaatgcccttatattagaaatgcttctttttttctcattaaatgttagtagactttatttttaagagcagctttaggttcacagcaacatcgggcagaaggtgcagagttcccatttatccttgcctccacacgtgtatacccttacccattatcatcctcttccacagagtggacctccactgacatgtttttattacccaaagtccatagtatacactaagattcgctcttggtgttgtacatcctatggctttaggctaatatataatgacatgtacttaccattatagtgtcatatgaagtagcttcactgctctgaaaagcctccgtgttccatctattcattcatacagccctcccccaacccctggcaaactctgatcactttttatcgtctctatagttttgcctttatctttttttgtctttcatctcacccctcttaataaaaaccattttaatttgttcattactatattcccaggttatggaatagtgctaggcatataatagatgacttttaaatagctgctgagttaatgaattattatatatatacacacacatacattatatcagtcatatgtaattatatacaaattatatgacatgtagatatataatatatttaatgatatacttgtattattattatatatgtatatatagatatatataggcattatataaaatactcattttgatggggatactgggaagtggaccactcatatcttagtgatggtagtataaattcaatgttctggaaaacaattagtcaactaatatctgaaatagtagagcattcatcaacgtttacccgataactctaaaaagtgtccctaaagatgcatcattctgtatccatcaatgtcagctttgttaagtgaatgttccacatctataaaaatagtacatgcaattatttgaaaagttatgctaccaaaaatactgactggcatatatagtaaagcaaataaagtttactaaataatatgtaagtattcatcttaatgtttttcttaattatgtgcacatatatttgtatagaaaaaagacaggaaagattatctataataattttaccatggctatctctgggtagtgtaattatggatcattgttttcttcatttgttttataatctttaaagtttatatcataaacatatttgtacttaggaaaatacagatagtacttttaaaagagttctgtttagttctccaagaactaaattttatcatttgtttaataagtatttcatgagcaatactaaactctcaaaatttgttaagtgctctgaagtttacaaagataaataaaaagcatatctgctctcaaatggtttatgttatcattaccttggtttatcatgggacaaagcaataattagacttaaatttaaaatttaatggggttttgggagatgaactatggtcttgaaaacaaaagggacatgtatgaaaccacaggtttctatctactattcattgagacgttgcttagccttttctaaactcagtttttatatctgtgaaataagaacattgagagaaacgaatgataaaatgaatgtactctaaagtagtatttcagatttcatttgataatacctccaagcaattaatctcacttatgttaaaaatatttttcacatttttttgtaatttatttgtaaatagaaaatatgttcgggattctaacaattgttgggataatgacagaaataattttctctgcagatctttcccccatcaactcatccatctttcccccatcaactcatccatctttccaaccattgattcatccatccattcatccagtttttataggatctttcctagacaaagcactgtgttgggcaccatggtatctctttaattacttttctcctttaacagtcctttaagactatgtatacattagaaaataattaatctggtatggtcagctatctatatgaccattttgagtcagctacatagctgatatgaatgaacttgatgaactccaatattaagcaggccaaaattaagatgctcagtgaagtttcagcagcatcacttgaagaaaggaaagtcagtgccttcctgtgttgggctgtggcccaaacacacaaggagtgtaagtttaaaaggcattctcaaactggaacacatccaaatcagttaacaaggctagaagatggttgagaaaacatactatatggaaactagttggagagaacagagatgtttaacctgaaatggggaaatttagtggaaaggaaggcaaatgcttaaaaatacctgaggttctagcccacgaatggtaccagaggcttgctctcagggattagaggtaaggttctaaggagttcagtgttgttagcatgaccaaccatatgcactttttgcccaagatagtcccagtttatgcctgctgcatgcagctcagttcactcctattaattacttagagtgccccatttcactcagaatgtctcaatgtgaacaaaaggttatatttgccctaagttttgtagaacccatacaattctttgttctacatcagaaagagctttccaatgataaagactattcaataatgtgatgggacaacttgccaagtgactattttcctgtcactggtaaggcacaagcagagacctggggtcacctgtctgggatgttctaggtaaggattccttatttggtgagaggataaagttggtgacttttaagttttctgccttctgattttaagattctgttgttttgtttttgaatattctatggtcaaatatcagttccatgacatacctacgaaaacacaatttttaaaatatactctttctctcgctaacatgaagacttctccattttacatttcattgaatttctgtggatgttgactaattctggagatgtggcaaattcatactagtagttctgtgtgtgataccttgtggaatgatgggaatccctgctatgataaagaaataagaccgggaggtactgtttaagaatatgacctggacagaaaataaatccaacatttattgaaatttgtttatttaatattgtaaatggtttgcttttatatagatttaatatatttaatagttattctatattataaatcattcactatagcaggctgtttcagggtgtaaaattaagagcgcactgcctttgaacttaaacggcccatgttagaatcctcagtgtgccagttacatcagttctgcgatttgaaatgaaatatttaacttctctctgagcctcaccttattccgtatatcctacaaagagaaaacactacaattttggagtgtaattctgaggattagaaataattatgttaaataaccttgtacacagtatgctttcaaaaagttcgctctggtgaaagactgttttgtgaacatgaaatctattttaacctacttgtcactatttaatgctgctctgtttgtgcatccttgtgttcaaggttgactgtccatttgttagcacatctgcatattcctcataattaatatctttttaaatgacatatggtttagtgactggaaatcgagtcttgccttctgttttcaatttgttcatgactcaatgactcaatatatgtgtctgaactttaattttccattctggaaagtagaatttaaaacccttgctcatatgtagctatttcggaaaatgatgaagaaatgtgtaatccaaggattttgaatatgtgccaggctattcagcgatgcagcatataggtaaaaggccgcagtttctctaatgttaacagagaagcctaaatgagaatgccaaaaatgtaatccctgaagtgaggggataatttggggtaggctagagtcagattcctagtgaattagcaagaagcaccacatctaaatggaatgagcacaggaagagttggtgggagccctagggaatgaggctgagaacatcattaacctggatgaacaactgatagtacccccagggcagtgcttctgcaagccagggatctctgaaagacaaggcccagtgcacccctggaagtgagtttctaacttccgagtcccccgtagcatttatacctcttttgtgctgagtactctttttttggtgatacagttatttgagtcaggtctaatctgttaaacataaagtagattatttgattccgccttctacctattctgccctttccctgcctctaacaagaaccttgtgcagagtggtattcagtgtcttgtattatagaattgaatttgatacaaaatattacaggcttatttgatattttaatgcagcattttatttcactattttgaaatgcacacacacaggcaaaaaacaaaacacacctcaaaagtaacatgttggtgggatgtcctgagaaagaattcagtgcatatggaaagcacagtgaattcattttctccctaaaatattcttcttcttgtccccacagacttggtagccaccaactacgtttgtaaagcctctgtttttgcctttgagagctcactcccagagttttataaatctgcagggagcaaaggtttaggacatgtgtaaataaatcattttatattttttcgtttgttttattttgttttgttttcttagagaagtttaggacatgtataagtcattgtctatttggtgttttgttttcttttgtttttcatatagatgagagtccagtggcgtatatcatttttaaagtttaataaaattatacattcaaaagattataccatctcaattattccaatctgtgatttaatttattgcttaatgttttgtatgaatttgattttctgaagcaggttaaatttgaaattttattaaaaacccacttcctttgagtttatagattgggatagctgttttatctagtcgctgtgtagaattagtatttactggacaagatgtgttgattcaggaggttgtcttggagtgtttgccccgtgagggtcatattaaacttgagagaagttctttgagcaacagagcatcttggagacaatatatcaagctgatggatacagggctcttctgttaagaaaccagcagtggaattatggctggctcccagttattgctttggtgctaaggagcctctaaggattaaatctaggataaaaggggttaaacagaggggaaaggaaggtttccagaattcagtgttactggaagcatacagaatgagtagttatatacaaataatttaagatgaccattctgtttggaaatatttcacaatttaatatattcaaagtgtaccaatttagtggagcatattgttttgttattactcagaagagaattcgtgacatcttattattattataaagcctactttggggcacttcttcctactgtcttaatagaaaggtaatgtagtttttaacacataaggggttttgtgtgcatattaaaaactaattttttcagggctaatgacttgaaattcagaatttggattttcaattacattatactccttgatgtagaaaaattagacaaaaataatcaaaagagagacatggttttatatgttatacattgtatgcattttgcactttattttttgcctgtgttttcacagtgctcttttttctatgtatgcacttattataaatcaattaaagtatatatgtcaaataaattatgattgttaaaaaccatttgtgttcatagataaaaatatcaattaaaaagcctttagcaatgaatgtccttcaaaccaaaaatgtgaaggtaagaagtggatagttggccctggacagcaatcttcttgcactttctagtcatgccacacttttactaattgagagaattatttcatatcatttcctctttcttcaagcctccatttcatccacccaatttgtcactgagcctttgcttttattttgctcactaagaaactgcgcatcatcaaaggagatctttgctattattccatcactgaatctactcactgctctacatcttcatctgtgcattcacttttgcacaatgggagaactatccctgctctgtttggcagccagtgtgcactgactctcagttgattcaaatgtgcactggctcacctctctcttcccacactaggactttgctctggcaattctttcttttacggtatcatttcccctaatctgtgttagattcttccaacaaacatgcctatatgctgcaacatcttccagtctttagaaaaccttcctttgatatcatgagcttttctagctgctgccccattttctaatcccttttagaataaattccctctaagtgttgtctaagctcactgtatctgccctttaccccctcgttgtcttcacaaccttagctcagactgctatgcccagcactgcactgcatctgctctttgcaaagttatcaaatatctgcacttggccaaatgcaaagtttcaactcccagtcttcttcctccttaaactctcagccgagttgatacagctgatacgttcttcctttttcatgtgccttctttctttactcggcttccagtctgcaccttctcagtttttctcctacctcactgaccattccttctcagtatcctttcctagagaggcctcctcctgacctcaacattttggtggattccagggcttggttctcagacctcttctatactcattctatcaacactcacttcctagtttatttcaccatctcagcctttaaagatcacatatatgctgacctacaactcctatgaaggctacaactcctatgaagacttttcctctccctctcctccttagtccgtgttagccacactgttccttaaacacaaccagaatgttttcctccttactgcctttgaatgtactgctatctctggctggattactcttcctccagacattcggatggctacctccctcatgccagtgaagtctctgttcaaatatcactgaattgcattttcttcctataatcttcccatcgaattgaagttgttacctagtaactaaaactgcccaattctttttaccttctctttccttacactgctttatttttctacaaagcacttatggccacctggtattattgtatacacagtattcatttgtttaccacctgctccctccacttgaatgtaagctacctaggggcaggagtggtgtctattttattcagtgctgttcttcttccacatgaagagtactgcttagcacagagtggagccttaataaatgtttattgaacaaatgaatgaattattaatgaactcaaacccattacagcagattgatgaaacatgtaatctaattcttctgttctcatcactggtcattcattagcctcattgttcacagacagcttcttctgaattggagagtatgtaaaattgacacactacacaaggttatgtataaaataaagttgaaaatggaccctgatatttcatttgttctcattattttgatcacttctccttcttcaccaatggcctctggtaatttgtggtcattaggaacctatattacaataatcagaatgttcccaacaaagtatattatactagcaattaaattatgctaaagaaagttcaggtcagtccaatgtaataatagtaataatagttagtgactaataattaccagggtctaaaatcaggtgctttatttatatgatctctgaacttcacaacaattctataaaggaaaaatattatacctactttagagatcagaaaatataggctcggagtcattaggtcattttcctaaaggcagagttttgctgaatttgctttcaagtttctgaatagctttggaacaaactgatatgatttggaacaagctgatatgacaggctcatttgagttataccagttggaaaaaattaattaaataaccagagtcatcttatcaactttttttagtagaataggctttagttttacacattcctgttaggccttctagaaccattcaaagagatttccctggtagattgtaccaagcaggtatgttgaagtcagaacagatttgccggagactcaactagactagaaaaagtggtatgcatgttccaacttgcaaaattgagtaagggcaggagaagggataactctgagaagggtaattgtataaaacacatagggaaaaaagtttactttttatattttcatgggtgagcattaaggctggaatacactgtattcagccattcatgtttatttatcattccagaaaaatacaattttagctaacttcccttcctccaaaaaaaaaaagaaaggaaaagaaagccattgtgttcacatgtagtggtgtgattaaggcagcaatggatgatatcggggggaagaatatgagatctggactgcttcagtgttcaattgtttggtctgttgaacaaagagttaaatgaaaaaggtactttaatatttgcttcactaaattccctccatgttttcaattagataaacagaagtacaggtgggaatgtgctgcatattcatttgtcttgctgtttgggggccggcttttaagactgaaatactaatgtaattgtgttgaaatgaacaataaggaagtacaggagttcaggaatgaaaatgttaaattaaatggaccatgtttaacattgttgttgatcctgaggaacagtttttccagtatatggagcatttcgattccatccagcatatgttctccacagttttctctgctctaattcatctgtgtttttcgacagctccagatggcgtgctgcctcccaggctttcatctgccactccaaccagtcttcaggttgtctggtctacaccagctcgtaataacgctcctggctctcccagataccaactccagatgaggtctggcgactccacccatggatttctagagtgagcattctactttgtccattctatcagctgggttatacaatatagacataacatttttgaagagtaggtcagttctcatttgcaaaaaatataggttaccttttaaaagtacaaaaaaaccccaaacaattagaggataatcatttgctttgcaaaaatatctatttttcatttatgtagcatttaaagtaggatttcttcccactgaaacttttcatgagcacatgcattacataaagcaatgaaactaacaaaatgatgtctgaactgtcgctaacaaattataatacctattctacaaatccacatggcagtcagtctcaatactactaggatttacatctcgtataaacacaagattacagactcagccaatggctacttattttaaaagagatctcatttgatggcagaaaattacaatacttaaatgtatgttgacatcctctaaaatttttttgtagtaagaaatttacttgcttttatttctttgaatgtcgaaaacttcctaattgacatttatttcccatacaggttattttccaatccttctgcatcgttaagctatgaagtgagtgatctccaaccgtacacagagtatatgtttcggttggttgcctccaatggatttggcagtgcacatagttcttggattccattcatgaccgcagaggacagtaagtggtctgaacaatacacagccaaatgtcttctacatagggagcttaaaatgtcttcaattttttccaaagcaaagaaatgagcctcccttatttacttgttgtttagtgacaataaccttttctagggcaagagagtgagcaaaggtggtcagtctctccagaaagaagaataatgtggtcttggagggttggagggttaggcctacagacaggacaaagtaattcactataaattatgatatggccccattctatccttcagggtacatcttagcgccctgcaagagaaaggttgtcatcttctgctttatgactgaatgttctctgtttcggagaaattctggcaggcagaagaaaatgaaatatggaccttacttcatgaggctgcttacatatacttgttcctggaaacaggtttcattttcctgcttctactcataccccaaagacagccttcagcatagagaagtataatctgatagcagtatattacaaaaggtggattaagatttctttattcaaccaataaagagaattttctagttgttcactaaaaagttatttttgcatatatttgctagattatatttgggaataaatacatgactataacatttggttttatacaaattacctctataaaagcatatatatgaaagtagaggggtttttaaagaaaagttagaaattaaatcaagctacacagagtgaataaggacattgtatctttgaacagttaggttttttgagttaatcttgtgaagtcttttaatcataggcttcttaggcaatgttctctgctggcccattgccatgctggctctatatccaatgagaacgttaagtgactttcaaaagcctagatattaacacaaaagtatggtatttgcaacaatatcaattgtttattaaatgtattgttttatttctataatacctttaattgcattattttagtgaagataagacatcaaattagacattatcagtacaatctatcttgtttaaagttgactttatttttacaaaaaaaagccacctttatgagcaataatgtatgttacttaattcatttcttccaattcgtaattactccctgggagaaagttagctactttgcaaggggacactcagtgtttttgttctcaagggtatcatttagtaaattatcagcacagtacgataaatggcacccaaagtccagaaagcattaattcaccaccttttaggaggaacattacatacactctggggaatctggacaccatgatcaccagatttatggactgaagacttcacactcaaaatagatttttgaagaaacatttgaaacaactgaagatagatttgtaatctccttcttatatatagcagcatgcttgatggcactaaataaagattagccaaaaataattattcaacccactgcagaggtgatggctcaatagaatgcttggaagaagggagaaagcattttttttttggcacagcattctttattctcctagagaaagggcaacactcaaacttcctcagcggtaatctccccacaattttcactgaatgagggccatgacctgccatctataggcagggaggtagcacataaataagcaaaagtccaaaatattgtaaaataccaattagcatagcatcctttgttgagcaaacttacctttggtctcctttttactataaaacaagccttatagaccacacatacacatcgttagaattttcatacccagagaccctccattgttgtggtatttagggcttgagtttaaagtgagtggtattaacccttcattttccttaagtaagaattagtaacacttgaataaatagcaggtatcaactcataaccattatttgtgtttaaatccgttccccaaaatgaatgaactcttccttcctctgctttgtgtatacactgtgaagtcacatacatagcaaagaactggaaggaggccatgtgtacctgcaggttacgttagcagtgcacctgagacatggtgacagggtactgtatattttagatgtcagtggagatggatgccatctctgaaaggatatgcaattgagttgacaaagactgagtgattggcattgggcacaagcagtttttctgtcaaggctacaaagcattgcttataaaaccacccatgttgacagctccatgccagaatcacacttcttacttgatcctgaccagcacctcctgctcaccaaagtgcaattttctttctctttctttcttctttctttgtttctttctttcccctctctctctttcactttctttctttctcactctctttctctttctctctctttctttctttctctttctttcttttcttcctttccttcattttttgagacagcgtttcactctatcgcccaggctggagtgcagtggcaccatgtcagctcactgcaacctctgtctcctgggttcaagcaattcttctgccttagcctcccaagtagctgggattacagatgcccaccaccacacccagctaatttttttaatatttttattagagatgggtttcaccatgttggccaggctggtctcgaactcctgacctcaggtgatccagccgcctcagcctcccaaagtgctgggattactggtgtgagccacctcacccaacccaaagtgcaattttcaatgtagaaatttcacatatcgtcttacagaacgaaacagagaagtcgcctcgtgcccacatttaaattccataccatcaacaggcacctttctgcatcagccacagcctcacagctttccagtgccaaaatgggtcaccaatggcaatatttttagtgtgacatttcaagacagtgattttcagcaagcctgtgacacaggtgaaaccacaaagagaaatctaggcaggcaatgagctacagccagagaagcaaatgcatgggtgcagagaagttatcatggacagggaaacaggatgtgaagaattttaatagatttttttttcaaataatttgtcatttacaccagtgtgccaccaatatccagttccatgcatttttaaaaatctagtgtgctgatgccaaataatcataatgcacatttcctatgaatattttaaatcctgttaaatgtgtgttaataaaagatgtttgttccagccaatttggtcagtgtagtgtttaactggttgcaaccagataaatacaaacaacacattattttttaaatgtgctgctggcagtccaagcacctggcatgtccacagcttgcaaaaatgtcctaagattatgttaggcttgggagcatgtgattaataaaatgaaggcacttgcctagcagctgaaaatgttgatatcttgaaaacaaagataaccatcactcctgattatatgattgttccttctctctcgtatgtttgcaattgttttctgtatagtacatgcatgtagaaattagagttggcagggagggcaagtttttcaaacctcagcttaaatgtggatgtattcttttgcctaccgaaatcctgccttgtgttaactatgaattaacctactttttcttaaaattgtggattccccagcccaaaaaagttagataatctgtttctcttaagatttcccaggaaataagattgaaatatggaatatctaatttcagtcattttaatgacaaacatatatggcatacacaagcaattagatcaactaatgaaattgaaatcattttctaaaaatcacttccctaccctcaaaaaaaaaaaccccaaacttgaattcactttagattttaacaatttagttgtcatatatttaaaaatgtttgatcgtttcccaaatttgtagtttaaaattccatatttatatttttaaccactagtctaagaggcactactgcataaaacctgtagaattcgaacagtttattctgtaggtttacttagacaacttttcatttgttcattattttgatgacacagtgatattttaagtacagttatatgctgcacaacatttcagttgatgatgaaccacatatatgacggtggacccataagatgatgatatcatatttttactgtaccttttctgtgttgagatacacacttatcattgtgtgacaaatgcctacagtattcagtacagtaacatgctgtacaggtttgtagcctaggagcaacaggctataccacacaaactagctgtgtagtgggctataccatctaggtttgtgtaagaacactctaggatgtttgtacaacaatgaaatcgcctaatggtgcatctgtcagaatgtattcctgtcattaggtgacacaagactgtaccattgccatgctatatttgctcattgcattacatcttgttattttttcacatttataattgcactgtgaacagaggagagggcaatgaaggaaattgtcttactgcctgggtcctgctttacttttcccctcagcaaccttcatccatccttcagatactcacagtaatttacaaaggaacagaggttcttctggagtaagacagaaaggcaatgtgaggtcaattgaaatctagatctaacagaacatgcttcttcctcttttgttgcctgacataattctacacattcatcaagccccagctcaagtgtcacttcctctgtgaagttttccttcttgttgctcccttagaattttggtttgtgtttactagtgaatcatcaatatccccttctgaattgtaacgtctcaagacctagggatctgtctcaactatctttctatcaccagtgtctggcgaagggtctgatatagagtaggtgccccaaaattcttactcaaagtactgattaaaagcagagtttgattgaagtaaatccacaaaaactcaatcaagcaaacatttaccgtgtacctactgtgtaccagggactaaaagagatatgaaagttgcaaggatggatatgatactgtttttcccttgagatttcctctgtctggcaaggagcacacacagtaaaaccatagttagagtgaaagagctgagttgtccatgagagcaagctcagaggaagggcatggcccctcaacatgagggccaggaaagcctacccagagaagaccaggagaggaattggaaatgatttatatttggagtgcactttaatatcaaagttcaaatttacaccatctccacttgttcagggtaaggctggaaagcaattgctgtaagagagcactgacatatgagacctgaagagggactctcaggttgtcctgtcggtcgttccagcctctgagtatgaggcgaggagggtggggacaagaggtgaatgtaagagagggacatcccaaaagtgattctcatttttttaccttggtcagaggcaggcttctggctgtccctctgattcaatattggctgctgtcttggctaggttaacgaatgttctagttagagaggcttctgccagccccaaatcatgtgctattcggaatgaaggggagggatgtgtagaaagaattctaaaacaaaaccatttttcctgtttttattctcacaacctgtaataagagtaaaatactctgagaccgtgtaacagaagaggaaggaaacatgtggtataaaatttgataaattgatcaagataattctagagtaggacttccgaatcatttaagtgcacatatgcccttaagattactgaaattttaaaactaatattgcatgacaaacatcttatgtttagggcattttagaatttaaagtttcacttgcatccttaaaatcattctacgcaacacaaggaaaatcggaatatttttaaatgagagtggaacatatttatatgagtacattttatttaatgaagaaagaggaactacaagtttcagtagtgctacacaactattttgctttctccattccaaatatttttccagttgccttaagtactaacctctgattgctgacatgtttttcctttcaaacagtaattcaggtatctattttgcatagaacagaagacccatgatcaaaaataacatttataatcttctgattttgagagcaaaatggttctgcatgttttcactacatactttgttttctgttgcatagattttctccacaaattcctgaattttcagaattaacaaattcaaatatttacaattatttttatattttatttttataatgtaagatcaaaaggaacttattcaagccaaaaatgaccaatacggaatcctttgaaaggatggattgattaatcaaaaattctatccaccttgcctcaatttcccacttaagctctcgaatctcccctgggcacttaaagcacactcctcttccaaatatagagtgcttgtaatgtctgtgtttcttacagctgaagactgcaggtgaaagtaatgaaaaatcaagttttttatgtttactttaagaaattaatgaaaaataattttatcatagctgccttattatcactacttaaattttattgagggtgtattatatgcaagacactttagcaggaaaagtatatcctctcattatccagaaatgctatctgctggccttccactatttttaaaaactattcttgttctttagctttgaaaaagttaaattgtcaatatttgaaaactctcagtggactatgtgagatcattcaaagataattgccacaggttgatatttaatggcatgagtttagttttaattctcaaatcttaaattcttagagagtcaagtatctaaaaactgctggttattaacaaaaagatggatgtttaccataatcattttctatagcattttctatagcacctgcctataaaagaacattctgcaatgctaaaacaatacatagattcatttaatcttgttgtcttcctcattttgataatgtacctgtaaacagagttgatttgctatatttggaataattcagataagttttgcccaaatataaggagtgaatgtgatgacctttaggttttttaggatgttttcctgacttcatgaattctcacatcaatgcattttattttctgcaccaaattatcgcagatgcatctactacgattcaccccacaatatgccccagctctagaggttgaaacattctttctaaacaatactctcctgatatcaggagaaatagagaaaaatagttcccgaatattggttctcctatttgcaaactatcaaataatgtccttccaattccaacagccttttagccttcagaggtttctttcattaaataatgttacttatgttatacagcccatttccttttttatcagagtcaggctgaaagttcatttttctgcaaaactgcagtgcccattcttaatttttgttttgagaaataactgttgtaccctctttattatcacaagattaataatatttctttattttattgctcctcttacatttggatcttttattatgagctgtcaaaaattcttttgggaagtagttggggtataaataataaatcgataaaagaattcatgattaaagacaagatagaatccattattctgttaacatatcagtagtgaataacaaaaggctacattgacaattagcatgcaatatattgctttatataattatacatccatatatttgccactttgatttttaattcactggtaaatttaggggatactcatttatggagttaatattaccaaaaagagtttttaaactgagcgaggctttaattagaatggtaaaatattgcttcagggcaacaatgagaatgtaacaagaaaactgactgatcagtcatgggtaactcgaatagcaaacaagtagagaagactcacaaaaccactgaaagttatatacacactcaagttgtgagtcattcaaactgggtattcatacacatgtatacaaatacaaacaagtgtgtgcgcacacaccctttccaatatacacacctgaatataaaactaaataagcagattcctctgttaacaattttattactctattttaggctggggctgaacttttgaagctgatgagcaaaatagtttcccataaaagataatttcatttgccaaaatgaaactactttccgttattaatgttgcaatgaaatggtttgaaatatgagtctgtgatctggacagaaaggatgctcctgttcccagctccaagagggagttctctaaacaattacacccacggagagcgctgtaaggttgtattttcatcaccggccagctgagctgtgtgcctgtcatactcccagtctcccctccagtgacagccgcattgacaacatgttatactccacattgattttacagttaaggagctgattgtgatatatagagattttaagaattcagctgagaggctgacttttgccttttatcattccattaaaattttataaccatctttttcatgtcatttcatccatgaattcttactttagaaagtgatagctactgctgtgagcataacttttctcatgttcagagctttttattgtattagcaaactaccccaattatagttattactcatgttttacataattgtggtggccctttcaaccatgcagttgcaggccagttgatttgtatatagaattagatgattcggcttatcattttaaagcactaaattgaaagagtgccaggagtcaggttttaacacttccctagccaaaggagctaattaagctgctttcagcttcctctccagaatcacacaagttaaaggacccttctgcaacaagagcagcgaatctactcagccagagcaggaagctaataaaatgtatgctggcttttaagggggaaacaaatcatgaaattgaaattgaacacctctcctttcccaagataagagatcatctttaagaaaaggctgtgtattgtgggggtttgaagtgcaagttcatctcattatcatggatgtttcacccataatactatcatcatatgcaggagaaataaaagccttatcccccaatcacagagaacaaactgcatcattgttgtttcttttccctgaagatgctcacagtttgatagttcacatatgaggaataattatgcaagacccagatgaaaaccctaataaaaaatattctgatttttaagtgtatattactctctttggggaagagagggtgagataaggttagacattaaagacttgaatctccaccattgattttacgaaacccaatctcaggggatttgggggtttttttagatttcaaaacaacattgatatcttacaagactcgtacttgcttttctctgggaaatagccaaatctagatgacaagcataaataagaaaggagctgtatccccattttgatataataattgctactgctactgtataccagagagcaaaagtaagaaatggcatagtggttttaagaaagctttaaaatgaaagctaacaagagactgaaacggaaagtgtgatttataccatgactgctggttttagggttttttttagggatttctcttcaaataggatacattaccaaattgtcagaaatagcttgatttcagagttagtgcactataacatcttttgcttcgaaaagtgattatgattctaccatcagtccagttggtgacaaatacgtggatcctgttgtgtgaaagtgtactcatataaccaactattattgcagtcactggccctgcaaagcagtggttgcatttaaaatttcaaccttctttgtaacactgaatcgcatacacacactcacaagatcaacgctgttttaaacaattactaaatccaagtatatcttttttaaagattttcaataaaatctaatgttcacagaaaaatctcataaatgtcaaaattgctgtgggcagaaaaggggggatacagtattttcttgatctgttttagcaatttatagatttcaggccgtggtttataagaatgctaaatgttctggaattacagctgttactgatcagtgattgagccagatttgtgttattgcaccatgttcttgcttgtacctagagagcagtaaagcctcaatataataaaaagcacctgcattttaaatgaaatttcaattgaaaaacttaacagcccttcaaattgcagaatttaacgcagcccagtaaagcttaaataacactttgcccccgcaggctgaggggtttgcattcaaggtgacttgattgtgtcgcatggtgaaattatttacaattaaggaatttctctggagggctgcagaatatttgctgttccacaacacctatgcaggcatatggtgggcctttttcagtattcatggagcctcctgaacctttatgataattgaatcagttagagtgctgagtggagcaagcataaaacctgttaacctaaaggtcagatctgtgcattgtttatttatcagtaggtgaaagagctaaatcggcagcttctgtcacagccacagtaaaaaatcgcctataatattaacagggagtagataaattgcaaaacatggattagaatgataaacagaaccaagtataatatagaatatataatgagagatgctgaaggattttactgggctgtaaaatatgcaagtttgttatgatagtgttattgattataattagttactggggctctagaaaaaaatgtaggggaagctagaactttagtaacaactaccctcttgtatgtttattaaatttatttttttaaatcctcattttttaaccaatggcttgaataaaaagacatgattttgataaagctgtcttagagaggaaaatgatcattttagtttcataatattcaacaagtatttcacacgcaaaatttatgagcaaagcaatcacagtccttgtctttatggcacttatttatttacttattggcctttaccaagtgttcattttcatatccttgtagcagagctatcactcattttagctttgaggagaggtgggacatttccaagaggtctgactttctggatttattttactttacagaacctggacctgtagttcctccgattcttctggatgtgaagtcaagaatgatgttggtcacctggcagcatcctagaaaatccaatggggttattacccattataacatttatctacatggccgtctatacttgagaactcctggaaatgtcactaattgcacagtgatgcatttacacccatacactgcctataagtttcaggtagaagcctgcacttcaaaaggatgttccctttcaccagagtcccagactgtatggacactcccaggggcaccggaagggatcccaagtccagagctgttctctgatactccaacatctgtgattatatcttggcaaccccctacccaccccaatggcttggtggagaatttcacaattgagagaagagtcaaaggaaaggaagaagttactaccctggtgactctcccgaggagtcattccatgaggtttattgacaagacttctgctcttagcccatggacaaaatatgaatatcgggtactgatgagcactcttcatggaggcacaaacagcagtgcttgggtagaagttaccacaagaccctcacgacctgctggggtgcagccacctgtggtgacagtgctggaacccgatgcagtccaggtaagatactgactattctctctcctttgcagacttaggaatgtaccctggattgactctgtgttgaacagagccatctactgactaaacaaacgcatttgttgttttaggcattcactggagaaactgggttttggcctttggcccaaactatcttaaattcgatgtcagtttttcatttatccctgtatccccttaattatattgttgagatgcttccatttgcctcgcacacctgaaatattttgaatgccacaatgatgcttagcttaaccaccacgtcagatttaaatagatcagaaaatgagaagagatgggaaaataaggaggaatgaattagcatattaacaaaattttccattaccaatagtctggtattttttaataatcaaagaatcaaagtaatggggaaagaaataaaaatagcatattaacgggctatccagaaagtgttcaattattcacctcattctattgggaatgaactctagtggacaggataactaccattgttttggctggcatacaaacttcattcaagggaaattagtgtaaccaaacaggagggagttttgtagcttagaagcctcttttgtgtaaatacacacaggcttccatggattcagtcttgtactactgccaaaagcattggtacagtagcttgctcaccggagcacaaaacaaaggacatttgcataacagcaaagttcatctgctgaaattattacttggatctatgttgtgtgttctctctcccccaccaaaagcaaacactaggtgatgctaaacagtgtaaattgttggagaaatttaatttaacctacaaattaaaagctatttttaaaagtctttgttagttttaatatgaagctggtcaaagcaacacacatttttgatataaatatgtgtatagaattccattcattaaacactaatgggaaattaattttaagtacacgatatacgatgtttattgtatgaactgagcaatgtaaagaattgctcttgattcaaaataaaaacaaaaccaaaaacaaaacccaagcatagagttaataatcattccagaaatgactttttttttcaatcttgggggagttttgtaaaactttggtagcagtaccaatcactatgatgcaacaaaacaaacacagtctctttacaaaggcaacactacataatggacattgttctggattatttcgaataaaaatcttataactaggcgttactgattgtggccgatctgaaaaagagtaagtattttcaggccgggtgcggtggctcacgcctgtaatcccagtactttgggaggccgaggcaggcagatcatgaggtcaggagatcgagaccatcctggccaacacagtgaaaccccgtctctactaaaaatacaaaaaattagccaggcttggtggcgggcacctatagtcccagctactcgggaggctgaggcaggagaatggcgtgaacctgggaggcggagcttgcagtgagccgagattatgccactgcactccagcctgggcgacagagcgagactccatctcaaaagaaaaaaaaaataagtattttcagaggaggaactcagtgtacaattctgcttgattcagcatatataaacaataattaaaagtatcagcttgcctggctttttcttcacatttttaccctcttttgattttgtaatatcatccatgaattaaacaatatacatggcttgtcagcctgctagagaagtttagattagcgtggctagaaagctgaatctcataggcactcacctgaggccacaaggcattggtaaccccaagtcaggaatctcaatgtctctaagaaggtgtctgaaatatatgaacatggtacactagtaatattctaaaaattcacactttttattctcatcttataactaggaaataaaaagttatcaatagaatcagcaggaatattcaactgagtctagtatttaatgctatatactatttaaagagtattaagataacatatctgtccttcagtattattggctcacatgttcagaacgatcttaagactttaccgaagtggacgttctcgtgatatagcttagctggtaaacagaggtatatgacagctaaacaacgacttctctttgtaaaatatgagatttaaaagtccaaattgcaaatagaaaatattttatatgaaataacagaaggatagtcattaatgcattggttaagaaattaattcaactatttatcatagagggttgttccaggtattaggatggatgaaggaaattgacagtaatattaacagcagtaacaataataatttcagttctattgacatttacggaacatcagtacatgagtgaacatctttgtaagtgcctcttttaggcagtagggacacagaagagatcaagatgaagtccctaggctcatggcgattacattttagacagaatgcaaacaaataactatgtaatatacctggaagtaataaggacttgggggagaagaacaaattgagtgtagagaaatatggaatgccagctgatagggtgggggataatacaaggagcagagttggtatttcaccttagtgttactcattttgtgcaatgtggtttttttctccatacaatgccacctgtaagaattacagtccaatagggaaatcaagagagacaacacatacttaggctaactagaaaataaatgcaatgtaacatattagtaagtactaaaagaggtgatatgacttggtataaatatgagccttgagaaaggcaaattggagagcacagcagcatagatgaaataatatgcttaaaatcttatttgattacaagaaaaataaatatataatgtcaaagagttgtgtcacctgaataagtgaaagccatgcacttttatttaatatttaatcacctaagaaaatgtatttcattttataaggttggtaaaaatgctctaccaagacctaaaacagttcaatgaaactatagactaatttcatttatgagtacagattcaaaatttctaaataaaagattaccaaattgaattaagcagtatattaaaagaatgatatacaaggacaaattgatttcattttaaaaatgtaaggatggttcaacatcaaaaaatctatcaacatatgtcttacatcaaccaattaaagtagaaagcccatatggtttttttttatcaatagatgcagaaaaaaaggcatacaattaagaagttatttctaacaaaaagtcaaagtaaaatcagattaggaagaaggtacttaaatgggataaagtcaatgtataaactgctgtactgaagccttgaattgaggattgataagaaataacatgtataaataactaagttgcatgactatgatgcaccaaaaaaaagaaaaaaaaaacttcttttatgataacatcatgagcctgtaaaccttgatgcccctgtccactttttcacaggtgaagcagaataaaatagagtaatcctgcagctgtcagctcctcttatacagtagggtcctcactcagctcagacaggtgaagccaccagccttggcaggtgcgccacaaggaacagtgtcacccagaccacaaacatgtgtagcttccttccctctgctatgtacacttagggtcactcatttatgggtttgataataaagcaaagtaaaagaagttgagtcttaatcatcatcctcattgacttttaaagatgggccaatgtttgatgtctacttaaaataaaccacagacaaaaagtataaaacagaggaaataaaataataatgaaaatatattcactgagttcatgttatgttctagaaattgctttcatttaattcttactacaactgtgtcagatagatgctattgtcattcccattttacagacaggaaaactgagaatgagggattaagtaatctgcataagattacataaggagtaagagttggaattcacacccaggcaatagggttctggagcctatgttcttctctacttctttacactgcaacaaatggaaaaaaagtgcaatcttcctggatggaaggacttaactccataacaagacaatccttccaaagtcaacatataaactgaacatcattcaaatcagaatgccgatgttttttgtttgttttatttcaaactggataaaataattttttattttttattttactttaagttctgggatacatgtacagaacgtgcaggtttcttacataggtatacatgtgccatggtgatttgttgcacctatcaaaccctcatctaggttttaagccctgcatgcattagttatttgtcctaatgctctccctcccgttaccctccaccccttgacaggccccagtgtgtgatgttcccctccctgtgtccatgtgttctcattgttcaactcccacttacgagtgggaacatgtggtgtttggaacatgaggtgtttggttttctgttcctgtgttagtttactgagaatgatggcttcaaggatgaagctggataaaatgattttgaagtataaatagaagactaaatgattgaaaatattatagaaaattgtggaagaataatgaggtggtactttctgtagtatgtaaacttactttaaagccattgagttataataatatggtattggcatgaaaaagacaaatggtcattggaaccaactagagagtttaggtatagataacgagtatttgttgaaatgacttattgtaggtagaatctgcattttatttcattggtaaagaatggtttgctttaaaaaatgataccagcccgaccaactatcaatgtgtacggaaaaaacagatccctttatcatatcatattataaataaattcccataaattaaaaatgttaatgttaaaaaagtaaaaatcttagaaaaaaaggagaatttcatgtaatctaaatgtaggggagcactttctaaagaaaaaaagaaactcagtagcttaaaaaaaaaagatagctatatgtagctagaaacaatctgattgattttctaaggcataaacttcccccccacccaccaaaaaaagttaacatccaaaagatagatctggaaagtacatctgtaacacatactacagacaaatcaatttcaccttaatatgcataggccttctaataatttataatacaagatactttaatagaaaataatttaggtaagaggatatattaggttggtgcaaaagtaattacggtttttaccattaaaaataatgacaaaaaccacaattaatttttcattcatacctcacataaagtcaagggagtgaaaattaattaaagaaacaagtaatattagcaaaaacgaatatcagtaatttcaagagtttgtggaggcacagatcacggataatttcattgtttatgataaagtgaatttccccaactttttaagaaagtagtatatcaataatgattaaaattaaacatgcattttccttttggcatggcaatacttggtaatctttccaatatgaaataaacacaagagcacatattgcatacattttcaaattttatttttagcataaaataatgtcagtaggattaacaaataatttgttttcaaccatgaaaggaatattatgcaaccataaaaaataatagggtgtgtccataatcaattaagtctgaaaagcaagttccagcataagtggtagagaactttttttctgtgaaaagtttttaaaaaataaaagagaaagagagagagacctaggatatgcaggagtatatttgctttgcttgtacgagcatacaaaaagtatggaagaataaacttcagactattaagttttcacctgagtgaaataaaacagagccacaattaatgtttcttgtatttatatatttgtactctttctctgtctgattgaaaaaatacaaatagaatatttgaaattaaaaattaagattaatatttttaaaggaaaggaagacattgtgaaagacaactttatttcaacaaatatttattgcacatcttgttctgtatgaatttttcaggggagtccatcataagaggaattactacactgtacggagtcaaatattcccacatgatctttctttatggtacatttttatcttctattgacaaaatactcttagaattatgcaatcttatgtctacacacgatggcaaggattgtctcatcacattagacatgagggttccgaggcctggagatgttaaatgttttgcctaaagccacaccgctttgagacatttatcatctcttagtccattcttaacccatatatcaatctttataaatgctcttattcatgaagttcttcaaaatagtttgatggagttaaagaagtgaggaagttgcttactatgcttttgggtgttactcttttcaagcctgaagccaatcaactaacctgcatgtctaagtttctgcttaaaatggggaactttgaaggtgccatgattctttttagagagacttttcagggatgtaaaagagctgctgaaagtcaatcgttccttaaacacttaaccggcaatttagccgtcctattttctgaagacttacaataaacagaaaaaatggaaacctgaatcattaagaaccactcaaataaaagaagtcattgtgataggaaagccatctctgaaataaacattttatttccagtgcaaaactataattctatttaaaagttttaatgtaatattattgttttaaagaacacatttcttgcttattcaggccaataacatgttcttttgtctgaatttttagggatgcaacaatatttcataatctttcttatgtacaatggatatacaaaaggtcataggaaattaaacaaactgaaagttttaatctcatatattttgaccacatatacaataataaatgtggtcttaagcatagaaaagaatagaatacaatatttagttaactggctccttaaaattcttggacatgggcagggcgtggtggctcatgcccgtaatcccagtattttgggaggcaaaggcaggtggatcacctgaggtcaggagttcgagaccagcctggccaacatggcagaacccctctctactaaaactacaaaaattagccgggtgtggtagcacacgcgtatactcctagccactcagggggctgaagcaggagaatcgctcgaacccagaaggcagaggttgcagtgggctgaaatcgcaccgctgcactccaggctgggtgacagagtgagacgctgtcttaaaaaaaaagaaaaaacttgaacacattgattaattgattgattgattgattgagatggagtttcactcttgttgcccaggctggagttcaatggtgcaatctctgctcagtgcagcctccgcctccctggttcaagcaactctcctgcctcagcctcccaggtagctgggattacaggcacctgctaccacacccaggtgatttttggtatttttataccttatacaaacattaattcaagatggattaaagacttaaatgttagacctataaccataaaaaccctagaagaaaacctaggcaataccattcaggacataggcatgggcaaggactaagtattaatggtttaaagtgttgccaagctctgacctgaactctcaaagtattctggtctaagaggcaagaaagccgtattcttcagattagtcaggttgaatttagctgtgatagctcttctttttttcatttctgttacaaataccaggaagctctctgagtttgaccttgactcattttccgggtccacagacagcattgcacctccaaaacaaatagcgtcctatatctgtgctacaacctttgctagttttagggtgtttttaaaaatattccccacatccaggcaaatcctctatgtttataaggaacacatctaaaacttctcttcatcccagcctctcttcttagaactctccaaaaagtttttttaagattcacaatgatttcatcccctgtagtataatttggtagatattggcccattgttaattataaattaccaaagtaatcatcaagcaattgtccaactagcatgtggtgagagcccttttgtcaccaattattagtaagaatactctttaaaaaatctcaggtcatagtcttcctggatgaaaccttctccctttgatttaagatagaaaattatggtcagtccttctccattttaatttctatattgctcctctttggtttgcataggggtacaaatgtacatataaatatgtcaccttgtagaaacctgtctcttaaagtttcaaaataactgtatgctagggaaaaaaatataatctaacaaaacatgactctaattactaactgaactccacctctgtgcacatggtactaagtgaatgtagagtttatccctgctatgaagaagcttacaggctgggacatgagatatatatcctggcatttatataaagagcactagaaggtaccaataaaagagatgaaagaggataacatgtaaataaatgatttttgtcatggcctgtgcacattttttaggatctctttccccataagaacatgagtgtgttaccactatgctcctgtagagtttagccagaaaagaaaataaacttcagacattctagaattctactacaaaatgttgttctttcttctgatgctcaagtccacatgttagctaagcacaaacatctttggcttccctttttcaaagctttctatacattccttatccctgagaagaggatgtgctattaatgctttaattgctaagttatatataaataagattcaggaactcaattttgcatcttcggaaaatatgaataatgatttctctttcccttcctccaagaaaaagtgacttatttggcagtcacactaacagtgcaaagaaatgagttctgatgtttcatttagttgagttataaacatgaaaaccatcaaatcctatgcaaccctattgaagcatgtggatgtgtgaattttctccatgtgtttgctctgtgtccttcagaacacccacagtggcgatgaatcgctaaggtgtgtatcagtctgacagtcgtagaaagtggcaagactgaaagccaaacccaggaaacagcatttcatttagctcctggagtactgctaattgatctcaaacccttcattactgtctagtccaaaggcctcaggagaatgtagccatttagaaaatgacttaactgaaaacaagagcaaaattctaggcctcgtgaacttcaattgctctattcctgtatcgtcacactgattctaagtttatctttcatttcaggtcacttggaaacccccactcatccagaacggagacatacttagctatgagattcacatgcctgaccctcacatcactttaaccaatgtgacttccgcagtgttaagtcaaaaagttactcatctgattcctttcactaattattctgtcaccattgttgcttgctcagggggtaatgggtaccttggagggtgcacagagagtttacctacctatgttaccactcaccccaccgtacctcagaatgttggcccattgtctgtgattccactaagtgaatcatatgttgtgatttcttggcaaccaccatccaagccaaatggacctaatttgaggtaagagaaggtgactatgatttttatgttgctgtagtccttatctctctgagaagtagggaaatgaaggaggcttttattcctatatgaacatagaactaatttggcattgaatatcccctgactcataactttcatacactatcatactgtacacttcaacttattatggaaacatcaaagtttatcaatttgaagaactaaaaacccttgaaaccacaatcactattgtctaaggattcgctacataatccatcacttcattttcaacatatgcttttattatatgttaggcaaacctgatgtaggttctatatgatacatttgcacaaatgtacctcagaattctaaggctaacacagtaattctttggcatgttgttagcttatggaaacttgtgaggagtgtggtcagggagcccgatacgatgaaagaaaagagctgtgattcagaaatggttttgcaaccacccaaacttgatacttggccaagaatacaaagttgataatattatcatcgtttataaagtattgatagtcataggaaaccattaacttgataagctttgtgtatttctactttgtgcgaaactggcagtaaagatttggcacatctaacttagaagaaatctaaaatgctatcattctgggagataatagtaaaatgcgaatgtaactgattcttcaaaatattaaatatatggaatttggtccagaaaaaaaaacgttcatctgaaacaaaaccacgtaactgtaaacttaagatgttattctttatgcttccacgcatatatcacacgcacatgccacagaacagcctgagttttggtaatctcaatatgagttgagataatcctgatgttcctgcttgtcttttgctttagatatgagcttctgagacgtaaaatccagcagccacttgcatcaaatcccccagaagatttaaatcggtggcacaatatttattcaggaactcagtggctttatgaagataagggtcttagcaggtgagattacaaaaactataaaaacaaatgctggcatttagttctgggcatgttgaatagttcaaagtatctcagtgtcttcattgtgtgagcgtgttatcagttatgcaataaaacatgtttggttattatctgtggcattaatcacccagctgtaacagtcagcatgtttaatgttttccatcttaactgcatgcttaaaataagccttttgaagttgaacttgtagatgttcaagccttaacctattgcctttgtcacggctccatctagacataaaacgttatggaagaatttggaaatattgaacacatacaaaatggggaaaattcctgggcacttgtagaatgcttgctatttctagaaatggcttataaatgaattataatgacttataattgattgtaagttattgattcagtccgcaaaagaaaacattagtgaacaggattgggacttgaaagaattcaatctagagttcaaagacattcagtaaaggctaataggtgacagtagaaaagggtgctacatgggagagttaggagatctggttctgctttagcctgtgctggagaactagctttgtgactttaggccacaaagcttcactacttaaaaatcacttaacttctctgggcttcatttttgttgtccataaaatgaggtgattttatagaattaaatgacttctaaatcttcatgagttcaagcaatgtgattaaatttcagaaaacatgaacgttattttatgaaaactcctcgatcatatgtttcagtaacttttctatgtgggtcattatttttctagacccaccactgggtagctgtagtctgaaccctgtttaccattctagccttgtctcccatccctttcttaccaaggcctctgcattccagccacatttgtattgcattcagtacctccaacatacaacacttgctctttcagcttttccccatagttgccttttcctgttgcctgactagatcatctgccacgtcttagcctggaggtttcttcctctaggaggcctttcctgccaacactcttgctggtctgattcagctcctctgtaacatttccataggacatcccctaacatatcactattgtcattgtagtgtactggcctgactgcttgtctaaacaccacgttatattatcagatctaccataaggcaggggtgcggtcttcgtgactctgtcttcagttcctagcatggtgtctggcacataccagcacatagtgccctacacctgaatacttaaaaataggttagctcaatcaagaattaattcactgctctgtaccttaggaatattagctgtagtgttcttctctctggggaatggcaaaactaaggaaaattctcctgtcctcttaaaaagttgtggtgggaaaacatcctagttcttgtaagattctcagagagaggcatctcgtaaatctgatcaagcaacagaatgaactatatgaaactgccacttttataggtgaagattggtcaattactagcagatccatgttgcttatcctaaattataatgctcattatactattctcaactacttttaattcattatttacttaatttggcatccctatatgattatcacttcagtagaataaattcatttatttttgcttatttgtgcttactgtgtgctgaggcactgtgataaggaacaaaagataaatacatcttagcccttgacctcaaagaacttataatctagtggaggaacccttccccccgccccctccatagagagtgtgatataatatgtatttttatatattatatacattattaattatatataataatcaatatatattatatatttatatattgattattatatataattaataatatatataattaatatatatattaattgctgtcctcagagttatctacaaagtcaccaattctgcctaaagaaatcacttcaaatagtagcttcctgtgacctatgaactcttaagtgcttaaatataactatttcaaaaaataaatagaacttgactctttaacattactgaatctgagttttagccatgagctactcagcaaaaacaaagaataagtttccaaaagttaattttgtttctttatacaagaaatgaaaacttattaaataattaggaccaaggccatgaagttagttatgaatttttagtgattcctctaaggattcttaatgagaagttcaaatctaagatttcaggaaaaaataaagtgaatttccacaacttaaattgaaacatgaattgacataaacacacccatgacagctgcttccggaagggaagtgtgcagataacaaaattgtgttaaagggatattttgactagtttcataatgccaaatgtcatttttttccggtagtacttgcacagattttttttatttattaaaataacagctacaacttacattaagcttgtagaaaaaaaaaaagcatttcttcttaacattcagtgtaaatggcgtgagtctttataagaatctctttttctagccctctaccctttataagtccataaaaagctaggagtgcctttagcccaagggggagtgtcttgcaaatatgagagaaaaccaaaacttgatcccctggcgggcaggatatttttctctttaaaggaagtgattttgtttggttagatggtgccactggccaccttggcaacatccggggctccttgttcctgctggtcagctagtggtctgtcaaattgcagagggggatgaagctgagtgttcatcatgtgttggttcacccctgtgttactgttccttcatggcccttcctttgcctatatttgttttgctgatttatttgtttggccaggtatgttttcctgggtttttaattgaattctaatatctttgggaggattatgtaatttcctattctccccagattccaccatcccaatttccttcttaacttaacgtctgcataaataaaaggagcactgaagtgtttcttaccatcttgacttgaatatcaccatagttacatttagaatcagcttttaaatggcacttctcctgatataaaaagtaaaattaagattcactagacatctctttatgaatatatttgtgacagtaaatataagttgaagccaatttcctagttcaagtggtctattttggctaagtatgtgtttataacgcatagaaaagcaccaatttaatttaaaacatcattatatttggaacttcagatcattctagtagttattttttcttttatatctacatgtacaaaacagtctcaagtcaattatccagataatttaattctaacaaaaatactttttgctcttatgattatcttaggtaaggagtaatttttgtctaaattgcacagctagttgcctcattatcgaattttgctctgcctgtgtagacacgaattccgtataactacaggtttatactgcttgtcagtttctaacttttcttccttaataattccttgcaaagtgagcaagttatggttgttgggggaactataactttgggtttcctgacattttcatcacttagaaaatctggcgaacgtgctgttatcatctgaagctgccgaagtgagtcaggcagggtttaacaagagggcggcgacctccttcattttaagcatcaatctaccttcacaattttcagcacctaacaacactgccttggttcctaagtgatcagataaaactgctaagaatacaatgagcatgttctccttttcgttgtggatttaaagaagaacaagttataataaacaatagggttattttactattatagagaaaatattgactgtcagattataatttagatttataaattagctttcattaagtttatgaaggaatgtatgttctaattgctattccttttaattatttatacatttctcagagtatttttttttttttttgcaatgacaatttggatggagacctctatgtgattcctcgagaatccactaattgtattacatttaaattaaaacattcaaaattaacacattttcgtcttatttttcaaagaagggtaagacttaagatgtaaatgcttaagctaaatatatcataaattctaagtttaaatcttattgacatatattttcatatatatttttaaatctactaaaataaagatgtttcaagtcctaaaagaggatgccatttctgtgggggataatattcaaaagaacataacttttgttcctcttctttgtaatgagattaaatatgtatagatgacatctgcatctttgctagtatgaaagactgggtcagttccatgacacgtgtttctataatataaataatgtcagattgtagctattaagtgaagaagttaactttgtacatagaaagggcaagtgaaaggaaagcttctcccgtgactaccaagatgagatagatcctgttaatttattccttaatatgggaatgtgaataaaaattgagtctaagaatgaaagccaacttctgtcaacactagtatgccatctcatagccatgcacttaattcaaaaggagtaaacatgtctttcacattcaaattaaattggtcacagtgttttttcccattggatttttttttcaatgccttacatgccctacacgatgtccttttctgtgtcatcatattatgtgttacctccttgtattagcccattttgcaatgctctaaagaaacacctgagactggataatttataaagaaaagtttacttggctcatggttctgcaggctgtacaagaagcctggtgccagcgtcttcctctggtgaaggcttcagggagcttttacccgtggtggaaggtgaaaagggagcaggtatgtcacatggcaagagagggagcaagagggcgctgggaggaatgccatgctcttaaacaaccagctctcccctgagctaatattgtgagggctcactcactaccacagggatgacagcaagccattcataagggattcacccctatgatccaagcacatcccattagggcctacattcaacattggtgatcacatttcaacataagatttggaggggacaaatatccaaactatatcactcatgaaaaatgaacttctaaatccagaaggatgtgttttgtcacaggaggtttttttcccctagtgttttcttagaataaaaaagcagaaaaactactttcattggctgtatttctttctcatggtgatgacaaagtagaacaaagatggaaattactgcaaaattatcttaggtctgacaattctggtagtgtagatatagatagcaacagaaacataacagcttcaagtttcactcacaatctaaaatgtctcatattaaaaatattcaagtgtgatcaacattactcttcaatttttgaagcaaaaatcttcaatactatttttagaatcaacaaatagattttttaaagtgtctaccatcagctgaaaattttaatagctatagacttaagcaatggaaacaatattgcatttcatttttctttgtttgctattcccacaaaagatttgaagatgtaaggaaaagtatgatttatgagatttctcaaatccacacttgtgtgatggtgtactgaaaaatactttgggttgtggcagagatgaggaagagttagtggaagaagcaactaaataacctgcattttcagaagcgtgatttatattggtgacaatattaacacatgaattctgttaggacatcaataaagttgacacatttttaattctgatgaaaataaccccaggcattctgcagctgccctgaagaattttggtttcccacaatatatcagtcccttccaagatacaagccttcacatattttgccctggacaaatgtcttcactggataaaataccacttcttatcaaaacctgccccaaatgttacctcctccgtgaagacttcccagctggatatggttaaattagatgcttcatctgatgcgtgttcaaagaataaggaataaatgaataaattagatgttctcatttaaaaacatatttctgtaaaattttatatacattatggctccaggtggacagataacaattttattatttttaacacctggcatattggtaatatccaataaatattaaatgaatgaacaaatgaatgagtgaagtgatgtattaaatatgaaaaagcaatataatttgttttcaatatatttttaaaagcactttgctaagtttcagcagagatattctttctattggacaggtagatttttatctcactaacctaaaaaattatataagtgacctgaaatttttgagactgagtgcttaaataactatgaaacatctattcattcatttataaaattatctattcagtaaataaacaaattaaaactgcatcatttaaacataatctagttttctaattcattggagtaataacacctgaaccttgaaatgaatattgttccacaagtaagattttaacacatattattttttatgaggaaaattaccatagtcatgtctataccataataaagtttacaatttgctgtttggggagtggaggagggagagaccggaggatggtctcaagcaaatgggggaaaaactattgtaatagtccaagtattcctaaatggacccaaaaacaattggttttactggctacatcatagactcaatataagtattcacttactttgaatacttatattgcaaaagttttttcctacagagtttaaaatggacatttttcaagacatgcctagagaacacactttgtatttagagaagaaattgattgatacacataagttttgtcataagtatatgatgttaattgatctagcatttttgttttaaaatgtattcttttatcatttattaaatggaatgtcccatttaatatcaacaatcaacacgtaagtccatttgaaaaacagtatacatagagtgaatggaaaaccacttcaagccaactaatacattctttttttgatatgaagtggtgaaatgtgaatcaacatatatatgtagacaagccataggtatatattcttactaaatacagattggaattcagatgaaatgaaaacagtatattttagtatttaagaggattcaggatcttgtttcctcggccaggcgcggtgactcacgcctgtacagaatcccagcagtgggaggccgaggtgggtggatcatgaggtcagaagatcgagaccatcctggctaacacgatgaaaccccgtctctactaaaaaaaaaaaaaaaaaagctaggagtggtggctgacacctgtagtcccagttactctcaaggctgaggcaggagaatggcgtgaacccgggaggcggagtttgcagtgagctgagatcgcgccactgcactccagcctgggcacagagcgagactccgtctcaaaaaaataaataaataaaaaaaaaataaaaaataaaaaaaaaatcttgtttccttaaaaatttaacttaacaatgaaagttaaagtacaaaagacaaatgtacggcctcaaatgaaatatctactgatttctcaattaaatttttaaaaagtggaaatagtgtaatattggaaatgaataaaccctatgtccagctaccccattaactagttgtgcaaacttacacaaatccacttgtttctcagggtctcagggttttttgtttaatctgtatgatgtagcacacactttattatttgtagcagataaactctaaagccatctcttactctaaaattttagaaccaccttgaaaacaggcatgcaattgtgtgtatctatgtggcctgagttttgtagacgtaaattgtgtatttcgccataactaaattattgtgaaatctcttaaagtattataaaaactaaagccctatagaatttatttacaatcaaccattttagcgccacctgatattgttaattccacatgtaggaaagaaccacaaacatggtatcactttaaatccataaagattattaattgtataatagcatagacatgtggaagaaaaatttacatattataggagaggaggctaggtatccagactctagctacatttcttttaagtcattttatgaagtaaaatataattataagtattttacccagggagagagctaatgaagccaaggtcgctggttcaattcccttgtgagccattagcttcatttcattccattgtcataggcttgctaccctcttaaccccgactcatcatccttcatattcatactattggttgcaaaggaaatttggccagactgtttgaatgtgtaagcaaaaatctattccctctgctagaaaaataacgcaaagttcaagccttagtgatatgacatcatccaagtatggacagaacagattatcattatgattgttattattactattattattatcatcactattatgttggcagtatagcatcatggttaaaagagcaggctctgaaatcagactgcctatatttgaatctcagtcctcctacttattatctcaatgacttggacaagttatttatctctctgagccttgtttttcttattttcaaaataggtattataatagcaccttatagagttttgtgaggaatgaatgggttaacatctgtagaaaatgcctgacagctattaagtaactattattattttttagttgtctggattatgtggactattcagcacttgctaaaaagcatatgtattcattttccagggctgcagtaacaaaatatcacatactgggtggcttgaaacaacagaaatttattctctcacaggtctggatataagaagttgcaaaccagtttgtattctggaccagactcccttccaaagctctgtagaagaaccctttcttgcctcttccaacttctggtagccctaggaaatccttggcttgtgacagcataactccaatttctgtttctgtttttacatggccatcacctccctgtgtgtatccatgtgtctataaaatttctctctcttttttcttccaaagacatcagcattgaatttatggtgctgcctaatccagtatgacctcatcttaacttgattacatctgcaaaaaccctatcttccaataaggtcgtgttcacagggaccaggggcttgggcttgaaaatatctttttgaaagatacagttcaacccactacagcagacaaagcagaaataaaagaggcattaaacacctgagaagagatggtaaagcagggaggtgtagaagatctgatgcaagcacatatttaggagaaatagataaatagcctcaaaaagtcactaagttttacctgtaattacaatagagcaacacctttcaatgtgggtcaggcagaaacctgcaaacgtatcttcgggctatgaataagaaacaggatgagtcaagcagatttcttctacctaggtggcagtaaaatgctctgaggatcctgatataattttggtcaaattatttaacacaatcctgcaaatggcacctacccacccatgccacaccacctttgcatcgtcaaatcagagattgtgacatattgagacaaatactgtgggccttacactggagatgaggtatccttgatcatctaataaacccaaattaggtaatgatctgaggccagtgtttgccctgtgtcctggatgcctctgggatggtcgtgtgttgcactacatgtttaagcaagtatctcagtctaagctattgtccactcatagactgactgtgtctgtttatggcatttccttacacaggtagttctgaaccaagcaaaggaagcctgatggtcttctgcccaaaactggttaaaaaaaaatggtggctttactctatagtcaatttaataaatgacttggaaagtcctcctcatatcacatcagcatgtcagtttttgccttctgcaaagtaatattcggtttccactgtattgactcaagtaaatatgttcacactatggcaaaatacagctcactgtagcaaaactctcagcgggagaatgttgtacactttggtcacagttacaatttaatttaggggtttatctgtctgcagtgagattatgggaaagaagcataggtatcggaagaaaatgttgatgagggattctgatatttgaaaatggatgagtttccaaaaagaagagcataaaactctctggatcaaattcagatagaaagctggcaggttgcctgatttgtaattgcatcttgaattgagctgtaatcctcaccacttctgaaaacaataagaataagaaaatgataaaccacatttgttttcaatagcaatatttgttcagcattcctaataaaatatttccctgatgttttggtttatgctggcaagtcacaaaattaatgatatgtgttgtgtaaggagggaaaataaaataatgtattttctagggaggaaaagaaaacagtattttgtagaggggtggaaggaaatcctgtattttgtgaagaaaaaaagaaattatttgttagattttctgtaaagtagaaattcatatactttttttaacaaaacaacattttaggtttacaacctatgaatatatgctcttcgtacacaacagtgtgggttttacaccgagccgagaagtgactgtgacaacgttagctggtcttccagagagaggagccaatctcactgcgagtgtccttaaccacacagccatcgacgtgaggtgggctaaaccaagtaagtaagcttctcatacctgtgttaacactttgtgtatttttaaaagcatattctttctttactatgaacctcccccatgtacacatcattttgatagtgaagtgttactggtaaatttttaccaattgcagattgacagggctgtcattgaaaactttagaagggccatttttattagtacccaaataaattagaaatggacacattaaaactaaaaccctggggcccctgtgccattcttaagatgcaaactctctcctactttgacattgttcttgggcctcctgctctccctctgtcatttcctttgcatgaacaacgtaatttctatcataccaggcaattgtgatagacatgtccatgtattaattggatacaatgtactattgttcaccttccttcagagagctctgccctaatatcttgtaactcgtcgctcattagcaagaaccatttaattggattgcaataatggaacagattcttcccagtggatcatcttcagactggctatgggcagaattccagcttgatccagtaaaaggaagcctagacatcaccactggatccacttaaataatgcagggtcgaccctggacctgctgggaacacttttttaacaggcatttggaagagttcacagagtaatctaatctgttcctgcaacgttagaaaccacagtaactgaaatttcacagttacttggtcagtagggtagtattaacatgttaatttgttgtgatctgttaatttgtgtcaatccctgacgactatcaggaaaaaaaccctgaatctaccatgagaatatgtattaaaatcagtcttataggtataacttgagatctggcaaatagtttcatcaaaacttgtcagaataacaccaaatattgagaaatacctgatcaggaaagacccactcaaaacattttatttatgaaagaacactctgctcactggggtaatcatctattgatgatataaaaagatgaaaagtcactactggttgggcaatgtaaccatgtgattttggttacactggatcagccttgaatttggttacagcttaagaagagagatgctccatttaggacacctgagtgatatcaattgtgaattaaagccagaattgaggatatcaattgtgaattaaagccagaattgaggatatcaattataaattaaatcagtaggttaggtttatctgtgtttccacaaaataatccatctttacaaaagaaaactgtctttctctggtttttataaggctgcaggtttctaatgatctgtgacacttgtattgggatctcttaaaccattttaatggaataatataagttaattgatgcttatggctaccctctgaaacacctctgggaaaaatacaaagtttttatctggggatgtgttttaaggcatatttccattcatctccctcttgctctctactccacctcactaactgattcatcttaaaagcctactcataaaggtaggctctcccccctcatctgacatttgaatacttctgttaagatccggctggtgaatttccaccaatataggtcctttatgttataattgcattcctgaagtaactgtgcttataaaaactgacaaacctaatagatctgaagcagctcactgaagtttcattaccttggtaatctgaacctctgaccttcgggatgtaggtaatgcaatctgctgttatttccattcataccttggaaatttttcagataactatttgtgagcacaaaggttaactctcagaagagggtcagtcttgcgaaagcttgttgcattatcattttcttcttttgggcaacttgctatcttaagtaaattaactagtcgatcctctgtgaaaggtggcctattttttgcaattttaattttaaattgttgtcttgattggataggaaaaacatggcatacagtctaatatgctcaaaggcaacaaactatagattgaaaatactttgcagtggaaaatcatgttttaaatttataaatatttgcttattaaaaatcaccttccaatgtatatatatatattttaaagcatggtctttgtctattatgaccctccccatgtacacatcattttggtagcaaaatgtttctggtaaatttttatcaatcacagattgatatgtataagttattaaaaacttttgaagggccagttttaaacattagtatcacatacatgatatgtgagataaaagcgtccctgtgttacttcagttcatttttggaaggcagatgttgcaaattggcaacacagtggccatatttccttcctcctccagcttccatacactgttttgcccacagtatttgaaaaaataatatttgcaaacatttaagaattatacataaagataatttgaggattcacttgacaagtcaaatgatggggtgaaacaatacccacatttctggaaggaaactatcagctggaactggcttcccctttagacagatcatgccctaaaaatctgacccggtccccattttcctggtcccaatagacaggtgatgtttatccctgctttatatgataatacaaaatattttgccctaaacaaaatacaccaaagataaattatattgtaattttgaaaaatcacagtttttgtatttgaaaaatacctcacttaaattatttatacaatcctcagaaaagcacaatgagatagaaaccagcccatagtaacttaccaaaaattatagaaagtaccagttcccaaactcaaacttaggactcaggcatcaaattttctatttctcatgcgtttagacttaacagtcattaacactttaacaagaaggatttaaaaggatccttctcatcttgactgctcagtctaaaatagaaggcaaaataagaaaatgcctaccaaagggagtacagtggagagatagtgcctcctttgaagctgattcactaaggaagtcagttgtggccagaaaagagcagtaaaacactggagggagtgagagggcaatgctttgtaaaagaggaaatgaaaaatcatcaaaatattgtctactttactgtctgtcaagagctcaccccaaccttcagatgttcatatcttgtatcatataatcctcctggtcttgctctctccttcctctttttttccatcttccttctttctctatttccttttttaaaatgtttttgtagagacaggttctccctatgcttaggttagtctcgaattaatgggctcaagtgatcctctctccttggcctcctaaagtgctggaattacagccataagggaccatgcctggccatttgtctatttctcttcttctaccctctctctctctctctctttcttcctattttccttccttcctcacagatacatttatcactttctctgtcctgagcactcagtgaactctggaaaatgcataaagtatgagggtatcatcattaagagggcaagtttaaaaccacagaaaaagcatttgtctcatcctgatctcttaatcagaaactaccaggtttgatagctagaagtatatctgactttgcctgaatttatctgattaaggtggcaatatctgtaaataattccaaatctcatctcttctaaaaagcacctaccattgttgcctcaccttgttcctctgttctcttttccatcactttagttatcaaatagaagagaccacatctgacttttccattgtcttccttctcagtcacttgtgcacctgttgtaatctgtctctcttcacttgtactctacatggttttcttaaagtcattagttatcacctaatgacccatttcaaaactctcttctcaatgccatcctactgtgttcctcttgtatccagcactgtgaatgatcccttactgactataattcttccccaataatcattactcccctcttctcaccaactacttcttctcatccctaaagatgtttctcaaagttctttcctgagtcttcctatcatactcctgttctcttgttggtgattccatctatactcaaggtttcaaattcttctaattacaaaaatgacaaccgccaacattgtatgcagccatatgaataaatagttttaaaatagactttgggatcagggatacttaaatttgaatcccagttccaatatgttttggcactacgacctagaatttaacctgagttccagttttctaatcagaaatatgaagataataactgccctgaaatctgttaaggactaaatgaaataatatatgtttaacaattagtaatcacctagtatttgtaatacagagtattattctatttctaaaatgtgcatggtcctttcaataccattttatataatatataaaaggggaagccatgtctagtaaaagcttggaagttgattttgcaagactattcagataaaagcattttttttattattattatactttaagttctagggtacatctgcacaacgtgcaggtttgttacatatgtaaacatgtgccatgttggtgtgctgcacccattaactcgtcatttacattaggtatatctcctaatgctatccctccccactccccccaccccacgacaggccccggtgtgtgatgttccccttcctgtgtcctagtgttctcattgttcaattcccaactatgagtgagaacatgcggtgtttggttttttgtccttgctatagtttgctgagaatgatggtttccagcttcatccatgtccctacaaaggagataaaagcatttctacagtgagttgaagatgcataaagaatatatgttattttataattacctgacttggctaaaagatagaaatttaaaaatctagttaaaatgttgaaaacttagtctgggttccatggctcatgcctgtaatcccagcactttgggaggccgaggtgggcggataatgaggtcaggagatcgagaccatcctggccaacatggtgaaactccgtctctactaaaaatacaaaaattggccaggtgtggtggtgcatgcctgtagtcccagctagtcgggagactgaggcaggagactcgcttgtacccgggaggcggaggttgcagtgagccgagatcgtgccactgcactccagcctggtgacagagtgagactctgtctcaaaaaaaaaaaaaaaaaaaagcgaaaactactaactattgcatggcatccattctcctctttttcttttagtgatagccttgccccttatctagaaactgcatttactaacctcccttgcaattagtcatggccaggtgaaataccagtagtatgtgtttgtgtcaatagaaagtgaaagacaatctgcatctttttgggtattaaccagaaaacactgggtgtgtgcctacttgttctcttttagcccttcccctggactggaatgaggacatgatcatgttctcaggttcaactatgcagtcgtgtacaacacccaaagagatccaaaatccccataagagaaagttcctgggttcttaagtgaccacatggagcacagtctgttttgatcactttgaagctattacatgagatacaaattaacatggattttatttaaactattatattttggagattttaggtttcaccagcttcgctaactaactcattccctgtttgcccatatcaatttaccttaaaagtagaaattagctatcctgttttttaactaaatataaaatgatgaataattaatatatctattatactatctcctttaaatacagttttctctggcaggcccctgatagaagctggaacactatgagagactaaagtagctctggagtttccaaagtgcaggtgtttggttttgacagatgggtaaactagagacaagacaggagatatgctgctcggaaaactaaggaggctgacttgaaggattattgcccaagaagttaatctttccacttcatgtcagcagtagtaccctcaggcagagtaaagaattttctcaagagcagttttgacaagctcaaattttccaagagctgcttagttggtgacgcagagccctgcaccatagaacttggaaaattggactctaatttggagattctgcgagcaagatcaagacttccatcataaaatcagcttaataaggtccttccaggtttttacatttgagcaacattacctcccaaaatgagcctgctaatgtgagatgtctgaagaatttagtcctagacaaataaattaagagatctaataaatgaaatgatttactataattgatctgaatcagtacaacaaactttttttgtaaagtgtcaaatatgtataatgttagactttgaagcccatacagtctctgtcttaactcaaatttgccactggagcacataaacagcaataaggtgattctgatttttaaataagcatggccatgttccaataaaactttattttggacattgagatttgattttcatatattaggttggcacaaaagtaattgtggttttcgccattgaagtaatggcaaaaaccacaactactttgcgccaacctaataattctcacatgtcatgaaatactttttttcttttgtttttttcccccaatcaaataaatgtacaaaccattcttagcttgcagggggtgggccacactaggccaacaggccagatttagctcatggaacatagcttgctgacctctaatgtagatgttaaaaatctagaagacataattgacattgataattgtcttggtctgtttgtgttgttataacagaatacctgaggctgggaagtcaataaggaaaagagttttgcttagctcatgattctgcagactgtacaagaagcatggctgtagtatttacttggtttctggtgagggcttttgtgatgcattaaacatgacagagaaggtcaaaaggtgagtggacatgtgcaaagatgcaaaatccaagggatgcccggctttctaaaaacccactcttgagggaactaattcatttcttcaaaaactaacccagccttgccagagcaagacaccaagccattcatgagaatctggccccatgcaacaaacacctccaactaggcctcatcttccaaaactagtacactggaggtcacatgaggtttggtggtgatataaacccttgatccccctttgctgggaaccatggcaataatttaaggccatgtaagaagcacaatctacttgctgttgcaggataacttttaactagcccgtctgttatggactaaagccctaattctcagtgtagctgtatttggagacggggcctctaaagaaatacagtcatcccttggtatatgcaggcgattggttccaggactgccccctaagtacaccaaagctgtgcatactcaagtccagcagtcagccgtgcagaatccatgtatatgaaaagttggccttctacacgagttttgcatgggagaatactactttattttttttggagatggagtctcattctgtcactcaggctggagtgcagtggtgtgatctcggctcactgcaacctccacctcctgtgttcaagcaattctcctgcctcagcctcccaagtagctgggactacaggcacatcccaccacgcctggctgattttttgtatttttagtagagacggggtttcactgtgttagccaggaaggtctcaatctcctgacttcgtgatcctcccgcctcggccttccaaagtgctgggattacaggctagagccaccatgccagctgagaatactatattttcaattcttgtttggttgaaaaaagtccctttataaatggacccaagcagttcacacctgtgttattgtgttgttcaagggtcaaccgtaattaaggttaaatgagattataagagtgggacctcgatttcataagttagcacacaggctcgcttgctctttctctctgtctctcccccaaccccttctctccctttctccgatcacagaggaaaagcatgggaaaactcagcagctagaaagtagctctccaaaagccagggaaagagccctcagcagaaactaaatttgctggcgccttgatcacgaacctctagcctccagattgtgagaaataagtttctgttgttcaagccacccagcctttaatattttgttaaggcagcccgagcaaactaatacatatctaactactgttaaaattatttaggaattcattataaaggagaggagcctgttctatatttgagaatttgctccagctaagataaaatttctgaccaaggattggaggttgcaactaaaaataacatttaatagcaaagctcttatccaaaaaggttacaacctttttcagctcactgagattgtaatagtctgttctcacattgctataaagaaatatgcaagactgagtaatttataaaggaaaaaggtttaattgacccacagttctgcatggctggaaaggcctcaggaaacttacgatcatggcagaaggtgaagagacgacatgcgagataggtgagagagagaatgcacacataggaggaactgtcaaacacttatgaaaccatcagatcttgcgagaactcactatcatgagaacagcgtgggggaaaccacccccgtaatccaatcacctcccaccaggtcctgcccttgacacatgggtattatggagattacaatttaagatgagatttgggtggggacatgggacctaaccatatcagagattaacttgatattcccacaagtagggcaatacctgctcagataaatttatgtggtccacaaaatatgcatcatacataataggattagaatatctgagaaaatatatcccaatatacacatatttaacataatctcacaggaaatcccgatttctttctattgcatcaaatacaagcaagtacaagccttaactccatattgtataactgtaactcaaacattcacattgtagtttttaagttcacctagttgccacagaaacacttgaaagataacaaaatcctaagctccaacaaccatctgagtggatccccacttggccaaggggacaccagagcaaccttgaaaactgagttcttggctacagtgggatgggaagtcagacacccctccctggctatacaccattagggttacttccctaagtgctaagcagaaaccaccctttcaaaagattccaccactgatatcaaccaaccacctgatgctgcccctcttctactaactgatgagagacctctggccacagagttgtcatggccagtgtatggagaatctgcagtcagggtcttcatgtcctcttcttcactgcttgatgtcagagggctgaaaactccaccctcagattgtgctaatgctgccatttttgtacgtgggatgcaccaggggatgtaaaactcaattgcacatgtgcgtgtttctcctttcataaatactcatgactcttcctgaggcttattgaatatgtatattcagtcaccccactcagcataaattcctgttgctcctcccttgaagaatcttttctggcttctggcttaaggctaccatatgcttcccaggctgtctgaatggccatcctgcaggctgcaaccctttatgagaagtaaagctctccttttcaaatttatgaacctcttctgttgacacacttcaaactcaagaagtctcaaatgaaacaagtttcaaaatctcatcccataattccatgttttctatcttatttaatgggattcacccagaaactaaaaccaaaaatctaagctatagctgtatctcttccttatccctttttaatttgtttatttacttatttgtacacgaataagttctttagtggtgatttttcagattttggtgcacccatcacccaagcagtatacactgtacccaatggttagtcttgtatccgttgcctcccttccacccactcccccgagtgcccaaagtccattgtatcattcttatgcctttgcatccttacagtttagctctcacttatgagtgagaacatatgatgtttggtttttcattcctgagttacttcacttagaataatggtctccagttccatcaaggtttctgcaaatgccattattttgttcctttgaatggctgatacacacacacacacacacacacacacacacacacacacacacacaccaaatttttttatccactcattgattgatgggcgtttgggctggttccatgttttcacaattgtgaactgtgctgctataaacatgcatgtgtaagtatcttttcatataatgacttcttttcctcttggtagatacccaggagtaggattgatgaatcaaatggtaaatctacttttagttctttaaggaatctccacactatttttcatagtggttgtactagtttacgttcccaccaagtgtaaaaatgtgttctttgtatcacatctatgccaaggtctattattttttggttttttgattatggccattcttgcaggagtaagatggtaccatattgtggttttcatttgcatttccctgatcattagtgatgttgagtatttttcatatgttttttggccatttgcacgtttcttggccattcttcttttgagaattgtctattaatgtctttagcccactttttgacttgattgtttgtatttttcttgctaatttgtttgagttgcttgtagattctggatattagtcctttgtcagaagtaaagatttttaagactgtctcccactctgtgggttgtctatttactctgctggttatttcttttgctgtgcagaagctttttagtttaattaagttccaactatttatctttctttttgttgcatttgcttttaggttctttgtcacaaagtctttgcctaaactaatgtctagaaggatttttccaatgttatcttctagaatttttgtggtttcaggttttagatttaagtctttgttccatcttgagttgatttttgtacaaggtgagagatgaggatctagtttcattcttctacatgtggcttgcaaattatgccagcaccatttgttgaataggttgtcctttacccactttatgtttttgtttcttttgtcaaagatcagttggctgtaaatatttggctttatttctgagttctctattttgtttcattggtctatatgcctatttttataccagtaccatactgtttttgtgactatggccttttagtatagtttgaggtcaggtgatgtgttacctccagatttgtccttttagcatagtcttgctttggctatgtgagttcttttttgattacatatgaattttaggatttttttcaagttctgtgaagaatgatggtggtattttgatgggaattgcattgatgggaattgtgttgatggtaatttgatgggaattgcattgaatttgcagattgcttttggcagtatgatcattttcacaatattgattctacccatccatgtatatgggatttgttttcatttgtgtcatctatggtttctttcagcagcattttatagttttccttatagaggtctttcacctccttggttaggtagattcctaagtattttactttttatttttgcagttattgtaaaaggggttaagttattgatttgattctcagcttggtagctctttgtgtataacagtgctactgatttgtgtacattaattttgtatcccaaaactttgctgaatttatttaacagttttagagggtttttggatgactctttagtcatccaaatgtctctagggttttctgggtacacaatcatgtcatcagaaaacagcaacagttggacttcctctttagctatttggatgccctatatttttttctcttgtctgattgctttggctaggatttacatactattgatataggagttaaaaagaaattaggcagatagggatggtaagagagtcctcaataaggttttccttttaatggagagcagcagcccccaaattatctcttttctgacaaagagcagcctgttaaattgaactgcagacatagataagcaagctggaagcttgcatggatgaatgccagcagctgcaccaacagaaaaaggctacctgggggcaaggcatgttcaacatagtggctccatctgcccttttctttgtcgagcacatgtacagtaagaaacagacaacatggcactggccaggtagagaacccatctgcataacaaaagattaggatggggtgaccaggttattcatgcactatgtaaatggcacacacagtcccatcaatctttaggccctatgtaaatcaggcactgcctcctcaagccagtctataaagctccgtgcactttgccgtggactggaagacccatttgggagcccttctttctctgcagaagagagagctattctcttttctctttcttttgcctattaaacctccactctgaaacttactgtgtgcctgcatccttgatttccctggcatgagatgatgaaccatggatatttaccccagacaatgatgctgcttcagtatgttgaataaaagtggtgaaagtaggcatacttgtcttgttccagttctcagggggaatgcttttgatatggtttggctgtatccccacccaaatctcatcctgaattgtagctcccataatgcccacatgttgtgggagggacccagtgggagataattgaatcatagggtgggtctttcctatgctattctcatgatagtgaataagtctaatgagatctgatggttttataaaggggagtttccctgcacaaactctcttttcttgtctaccgccatgtaagatgtgcctttcaccttccaccatgattgtgaggcctcccaagccatgtggaactatgagcccagtaagcctttcttttgtaaattgcccaatctccagtatgtctttatcagcagcatgagaacagactaatacagtaagttggcaccagtaaagtggtatgctgctgaaaagatagccaaaaatgtggaaacaactttggaattgggtaacaggcagaggttggaacagtttggaggattcagaagaagacaggaaaatgtgggaaagtttggaactccctaaagatttgttgaatggctttgaccaaaatgctaataatgatgtggacaatgaaatccagtctgaggtggtctcagatggagatgaggaatttgttgggaactggaacaaaggtgactcttgttatgttttagcaaagagactggcagcattttgcccctgccctagagatttgtggaactatgaacttgagagagattatttagggtatctggcagaaaaaatttctaagtagcaaaacattcaagaggtgacttgggtgctgttaaaggcattcagttttataagggaagcagagcataaaagttcagaaaatttgcagcctgacaatgtgatagcaaagaaagtcccattttctgaaaagaaattcaagacagctgcagaaatttacataatttacctaagtaatgaggagccaaatgttaatccccaagacaatggggaaaatgtctccagggcatgtcagaggtcttcatgacagctgcgaccaacacaggcccagaggcctaggaggaaaaagtggtatcaagggccagacccagggttcccatgctgtgtgcagcctaaggacttggtgccctgtttctcagtggctccagccatggctgaaaggccccaatgtagagcttgggccacggcttcagagggtgcaacccccaagacctggcagcttccacatgatgttgagcctaccagtgcacagaagtcaagatttgaggtttgggaacctccacctagattttaaagtatgtatggaaacacctggatatccagatagaagtttgctgcaggggcaggcactcatggaaaacctatgttggggcagcacaaaagggaaaaggggtgggtgcctccacactgagtcctcattggggcactgcctagtgctactgtaagaagagggccactgtcctctagaccccagaatagtagatccaccaacagcttgcactgtgcacctggaaaagcacagacaatgccaacctgtgaaagcagccaggagggaagctgtaccctgtaaagccacaggtgcagagctgcccaagaccatgggaacccacctcttgcatcagcatgagctggatgtgagacatggattcaaaagagatcattttggagctttaagatttgacttccctgcttgattttggacttgcgttggggcctgtagcccttttgttttggccaatttctcccatttggaacagctgtatttacccaatgcctgtacccccattgtttctaggaagtaactaacttgcttttgattttacaagctcataggcagcagggacttgccttgtctcagatgagactttggtctgtggacttttcagttaatgctgaaatgagttaagactgtgggagactgtggggaaggcatgactggctttgaaatgtaaagacatgagatctgggagggaccagggcagcatgatatggtttggctgtgtccccacctaaatctcatcttgaattttagctcccagaattcccatgtgttatgggagggacccagtgggagataattgaatcatgggggcgggtcttttccatgctattcttgtgatagtgaataagtctgatgagatctgatggttttataaaggggagtttccctgcacaagctctcatttcttgtctgccaccatgtgagatgtgcctttcaccttctgccatgattgtgaggcatccccagccatgcggaactgtgagtccattaaacctctttcttttgtaaattgcccaatctcaggtatgtctctatcagcagcatgagaacagactaatacagctttccacttttccccattcagtatgttagctgtgggtttatcatagatgacttttattacattaaagtatgtcctttctatgcctattttgctgagggttttaattataaagggatgctggattttgtcaaaggctttctctgcattgattgagatgatcatgtgatttttgttttcaattctgtttatggggtgtatcacatttattgacttgcatatgttaaaccatccctgcatccctggtatgaaacctacttgatcatggtgaattgtctttttgatatgctgttggatttggttatctagtattttgttaaggatttctgcatctatgttcatcagggatattggtctgtagttttcttttttgtcatgtcctttcctgtttttggtattagaatgatattggcttcaaagaatgatgtaaggagtgtttcttctttctatatcttttggaatagtgtcaatatgattggtacccattcttctttgaacatctgatagaattccgctgtgaatctgtctggtcctggactttttttgttggtaacgttataattaccatttcaatctcactgcttgttattggtctgttcagagtttctattacttcctggtttaatctaggagagttgtatatttccaggagtttatctaggttttctagtttatttgcataaaggtgttcacagtagccttgaatgatcttttgtatttctgtggtatcagttgtaatgtctcctgttttatttctaattgagcttttttggatcttctctcttcttttcttggttaatcttcctacatggtctgtcaattttatttatcttttccaagaacaggtctttatttcatttatcttttgtattgttttggttgtttgtttcaattgcatttagttctgctttgattttggttatttcttttcttctgctgggtttgggtttagtttgtacttgtttctctagttccttgaggtgtgaccttagattgtctatttgtggtctttctgagtttttgatataggcatttaagactatgaactttcctcttaacactgcttttgttatatccaagaagttttgataggttgtatcactattatcattcagttcaaataatttttaattttcttcttgatttcattgttgacccaatgatcattcaggagcagattatttaatttccatgtattggcatcattttgagtgttcttattggagttgatttccaattttattccactgtgatctgaaagagtacttgatatgattttaattttcttaaatttgttgagactcattttgtggcttatcatatggactatcttggagaatgttccatgtgctgatgaatagaatgtatattctgcagttttggggtagaatgttttacaaatatctgttaagtctatttgttctagggtatactctaagtccattgtttctttgttgactttctgtcttgatgacctgtctagtactgtcagtggagtattgaagtcccctgctattattatgttgccctttttaaactcctatgtgtcaattaaagacaggctttttccatctagtgaatccaccattccccagggccttagagtcctaccttagatgggaaaactagaccctcatagacggccaattgctccttcacatctcagtccagatgcatggggcccagaaaatgtagttcaatgatttgacaagaagagaaaaatgttggtattagggagttctagaaatctttgccttcagattacagaagatagcttttatcttccgactatattttaaaatttaaatggtattaatgatattaatggttactaatgtctttctctgttttttcatgccattctattttatatgtaataaagaacttaatatgctgttacttttcttgcctttctcatctgctgttttcaatgttcagtttattattattgttaatattgttgttatgatataatttttttatgcaactattttctctaaatagcttcagtacttatcagcaattcttaaactttcccaatcttgagttctggatcttgattaatctttctgtcttctgaagaagattattggatagttttatcatgaaacttaaaaagatcaattaattagttttatgttctctaaatgtttggtgatataagaaagtatttctctcatctttgcacattctcttaaatttgcccaaataagaaagtatgtctgttgtttttacacataagtaaccatttaaatgtgtataaaattcttggattaaactatttcccctcaaaacttgttgaaattgttccattgtctttcaacatttgacattccacataagaagtttgaagcttatctgatttttttctcctttataaatgttcctaatttttggtttacctttaaaatgtttcaatattccatgatatgtctatgtttggatatattgtgattattttggagaaaactgtattagtctattcagtttgtagacataagtcattttgggtaaggtttattggggcatttcatatccataattatttattgcatttatttttaaggtaattagactttttctgttctcgatgtctataatttttactttcactgatgtccttgtcattttcctgttaattctttgatattgtgcatttttaactctgctcatttctgctttcaacgtacgttttaattctgccattgctttacatggttccttgctctcctttcttatttaaggcagacccctttacatctctgtctttgtggctgtctttttatgattttacaaacctacttcatagaggcttctttttcataaagtaatgtcccttttttatttttggtacaccatgcaaatattttataaaacctccatcccattgtcatagaagtaatatacacaaaacttctgccttggaaggttctagacaagatttcccttgtcttatgctaggaagaagccttgtaacttatgtttttctatttaaaaaaggagagatacattcagacccagcttttctcaatagacagggagggtgaaatttacttgcctcttcattcagctgtttccatgttaatagccttcctctctcagaggtaaaatcaaggtcatcagcctttaattttgtgctggtctattgaactgaagatgtatcttctgtttcttagatggttcactgacttaggaagagtacatcaaagtttaaagaccttatttgagcaatgaaaaagatgcttctatgcatgtactgctcccagaacttctcatgtgataaccaggaacatgtataaaattgtatgtgtttctacatttttctatgttttggacttccaagtgtaacatccacatgagtggagaaacaagtgttgaagcaaatgttggaaacagggagaataggccagaaatccggtacttgttacccagaagtgctgcctgtttctgttctcaagagcctccatatcatgcagtaagacataaacaatggaacggaatcaccatcttttcctgttgtcctaggttctgttctgtttcagagggactggcatacggtgcatggctaagaaaggacatttaatggggtctcatccagacattgacatgtgatctttgctcatcttgaacttgtgctagtggaaatatatttaatgtatctacataggtatattaattggaacttgatagtgcagataacaggcacatttaataacccaagtgaaattaatttatatacgtaagtgaagtttgaaagcatttcattaatattatatctttagggcttgactttataatcagcctgctcacttaacaaactaaaattcaacataaactacaaatctagtacactttgcattataccatagcagccacaaattaatgagtaataaataatgctgtgagacagtagaaaatgatgctagtaacagaagaaacgtttgcactcactacacccatggctttgctgtacttgacgaatattatcattcaggaaaatgttaagggattttaatagtcagttcctgccgatgatcaataatgacctcattattgcatgtgcttacatttttgtgacatcagaggaaagaaacactgcaaaacccagaattttccaaattaattgctaaaggtcttccaatacaaactcttccaactacactggcacatcatacccttttaactatttctagagctaaagtgaaagcagtagtgtatttaggaaaaacaaaaagaaaaacctagtattcagtttttatgcaaaatcaccaagactttaatgtaaaggggtcctttaaagaaacatactattctcaaagctatattactttatatggccatatgctgggatctcacatataagtgaaattggacttcaatagccataaggagaaatgccactttttcctcccaatccttggactaatgctgtttaactttttttctttttttttttttcctgagacatggtctcattctgttgtccagcctggagtacagtggcacgatctcagctcaccacaacctctgcctcctgagctcaagccatcctactgcctcagcttcctgagtagctgggactacaggtgtgtgccatcacacctggttagtttttgtgtttcatgtagagatggggtattgccacgtttcccaggctggtctcgaactcctgagctcaagtgatctcagcctcataaagtactaggattacaggtgtcagccactgtgcccagcctgagcaatttttgatgcataatttgacatgaaatttcagaaggcttgtaagccaacactccacccccatcctaacaaactaaggtaatcgtttctgcttaaaagtctctgaaaataatactgatgtaagtagagcagcataatacttcctacctaagaaaatatggctgttttcatgttctcttgttaaagaatcattgtgggcagataatgagaagcagagcctaaggaaaagaatggataaattgggaggaagaggagaaaaaataatagactggtctttgaaaggataagggttgaagaattgatgagttatatttgcaagacagttagtgattgattttggtatcttttaaaggcttctctacattatagaaacacattgaactagaagagaaggatgagagccctgataaaaatttaagtattatcctgagccagtccttaaggggagcatgctatgtagccctgctacattgacaatgtatataaaaggatatctttctaagcatccttctaggtatcagttagcgaatgttgttagcaagttaaaaaaatgtctctaggatctgtgtcaggaaatgctcttatttgtattagcctagtcttctctctaagattatgttacttatgagcagaagttgttctatgtactgtatactttcattttcatcttagtttcctttcataagtgttatatcaaagttctgatgattcattgaataattataagtagcaaaattaaaatatttaaaggaaattaaaaagatgagacttttataagactcatattcctacataagactgcaattaattatgagattgggaaaaaacgcaaattattaaaaaataaaaactgaccaggtgcagttgttcatacctctaatcccaacagtctgggaggctgaggtgggtgaatcacttgaggccagaagtttgaggccatcctgggaaacatagcaagaccctgtgtctacaaaacactgataaaaattaactagtgtgatggcctgagcctgtagtcccagctacttggaaggctgaaacaggaggatcgcttgagcccaagacatcaaggctgcagtgagccaagattacactactgcactccagcctgagtgacagagcgagactctgtctcaaaaataaataaataaaataaaaactatcaccaccagcaccaccaaaaaggagatctcataagctttttttaacatttccaaaacaaaggctctctaaacttctttttttctcattctagaaagctaatgatagaattttttttttcccctgaaagcctcagctacattcaccatgtcctgcatttattgttgacagctgttcaagacctacaaggtgaagttgaatattacacacttttttggagttctgctacctcaaacgactctctaaaaatcttgccagatgtaaactctcatgtcattggccacctaaagccaaacacagagtattggatctttatctctgtcttcaatggagtccacagcatcaacagtgcaggacttcatgcaaccacttgcgatgggggtgagtccagattctaaaggatatttgcctcagagatgcgaatgaaattgattgattcttgccggggttgagatcagtcatccctccattataaaatttccggtgtgggagggaagggggtggaggctaaaatgcttaagtgctcactgtcatcagtagcagatcaataagcagtcccattgagacagaagcacaagctctaataatgagatattagcccagtttgttcctgttcttttcagtgtatacttattttagaactgagttcacatcaataaatggtgacatttagaaactttttttttaagatttgccctcagaagcagtacgtttttcaaaacgacagccaaacacagtgagagccctccctgagtcaccagaaatggtaggtggaagttcagccactgagaaaaattgcctgtgactcatttctaagccagttagcaagggggaggaagcaagggaagcaacttgtgaatctgaaatgtgtttggaatggtctttctaatcttttttggctttataaagtctcattataaacattataatatcattacctcccaagcaagtgttccaggtcattagcagagctctttaagtgtggaacccatttccctttgtggtgccaaaggtcggcaccttttgtttataaaatagggtagatcacaaggacaattcttcaactagttaagatgggttcttatgataaaaataggtctttgcatagttatttctgacatgcttgaataattatgcaatttaacgctaagcaagatttttttcttatgttagatttcatcattacctatggtaatcaacattcaaaatcatttacataatgacaatattgcattattgcttcatattgcttgagttacaagctagtaacatcaaatgatttttcacgttccaccagcctcattgtatttgagttttattttttgctcaaggagcaaattttatttccttccctccctcccctgcaccttggaggtatagagtgaaaggatggaaaaaagacaaaaaatagataagtgttagtggtgcagatgggtgaataatttatcatcatatcccactggtcacatagtattgaagattagcactatgctggtggtataaagcattttaccaccaattcttatggtttctaactgagagtataataagccaatttacagaggactacagactgtgataacttcatcagcgaaaagcagataagcgaggaaccctttgctaaacctaaatactaatctgcatttagcttaacatgtgctttttcagagacagctggagtttattcagtttcttcctttaattctagagcctcagggcatgcttcctccagaggttgtcatcatcaacagtacagctgtacgtgtcatctggacatctccttcaaacccaaatggtgttgtcactgagtattctatctatgtaaataataagctctacaagactggaatgaatgtgcctgggtcgtttattctgagagacctgtctcccttcactatctatgacattcaggttagaacattgttttttgatggttaggcttatggatatgttaaataaaacatgccaggctatgtcttcaagtggatatcttctgtcttggttacagattatttctttggtggggaagggaaaagagagaagggaaattgatcagaattaaatctgtgtgctgtaggcaaacatgtgagtctctggagagaagataatgataatatggaaaacgatggtgatgaggatggtgatgaaattctcactggcaaaataaagctaatcatgtattctaaataaatcttgttgagcagcttaccttttcccaggatcttttactgaaatcaaaatcagaatcagtttgtaaatgtggagatgtttttttctcttcccatttctcctatttactaatttaatatctccagagaagttatgaaacttcacttggtgtcaatttcctcttttgtaagcgcaatggactagatgtcttaaaacattctagccacctctagcattctgtgattctgaatgcaacaggaagacatatataaaaaatatagcagacaaaaaatattaaaaggttttatctgaaggtgaaagaaatatatttattcatcactcaaaaaatgttcaatgttctccgcatatgtgagagcaattgtggttaaaattttttgcccttggacttctttgagaatcttatgaagtcagtgtactctgccttagaaaaatatttatgcacttgtatgacaaaatttaacacataatttcagaaagtgcactgatcacttgaagtcaaattcatagacttcttcaggggctactggccttaaaagtagaaaaagtatagggaatactaaggcatataaaacaaggaacttatcttcacggaattggaaatcttgttggagtaccaagccataaaagataacaaggctaaatgtgcaaatgagtgataaaaaaaaatcagagtatttcagaaaccccacatttagagaaagcttgcaatttacaaaattttttaataaactatgctacttctaaaattcataagagcttcgtaagataattttcagaagatattaagcacagaaattttatatgaccacagaaactttttactggttctatccatttaatagtactacctcattcaggtttccatctccttttcctgacatttgaggttaagacatataatcatctggctacaaccaacactttagtctcccctactctgactcatagacctagcttcctaagaaaaccaaataaaaatatctttgaataaagaagaaaggtacattaattatttttctttttttttcatttaaatgtattttattttaagttcctgtatacgtgttcaggacatgtaggtttgttacctaggtaaacgtatgccatggtggtttgctgcacctaacaacccatctaccaggtatttacctgtacatgtattattagctatttattctgatgatctccctcccctgatgcccccccaacaggccccagtgtgtgttgttcccctcgctgtgtccatgtgttctcactgtacagctcctacttataagtgagaacatgtgatgtttgtttttctgttcctgtgttagtttgctgaggataaaatggcttccagctccatctatgtccctgtaaaggacatgatctcattcctttttatggctgcatggtattccatggtgtacatgtaccacattttctttatccagtctataattgatggacgtttgggttgattccatgtcattgctattgttaatagtgctgcaatgaacatatatgtgcttgtatctttataatagaatgatttatatttctttgggtatatacccagtaatgggatggctgggtctaattgtgtttctggtcctaggtctttgaggacccaccacactgtctttcacaatggttgaactaatttacattcccaccaacagtgtaaaagcccttctatttctccacagcttcaccagcatctgttgttacttgacttttcaataatcaccattctgactggcatgaaatggtatctcactgtggttttgatgtgcatttctgtaatgatcagttatgttgagctccaggtgcccaccaccacaccaggttattcttttgtgtatattttcagtagagacagggtttcaccatgttgaccaggctggtatcaaactcctgacctcaggtgatccacctgcctaagcttcccacagtgctgggattacaggtgtgagccactgcacccagccaagtatctactttttgaataatccctttatatgtcccttttacaaagaaataataatttcatttttattcagttttacctctttttaatataaatatagtaagctttatatgtttgttggccgcataaattcttctttggagacgtgtctgttcatgtcctttgcccattttttttgatggggttgttttttcttgcaaatttgtttaagtttcttatagattctagatattaaacctttgtcagatggatagattgcaaaaattttctcccattctgtaggttgcctgttcactctgaggatagtttctgttgctatgcagaagctctttagtttaattagatcccatttgtcaatttttgcttttgttgcaattgtttttgatgtttttgtcatgaaatgtttgcctgtgcctatgtcctgaatggtattgcctgggttttcttctaggatttttatagttttgggttttacatttaagtctttaatccatcttgagttactttttgtataagatgtaaggaagggatccagtttcaattttctgcatatggctagccagtttttccagtaccatttattaaatagggaatcctttccccactgcttgtttttgtcaggtttgtcgaagatcagatagtggtaaatgtgcagtcttatttctgagatctctattccgttccattggtccatgtgtctgtttttgtaccagtaccatgctgttttggttactgtagccttgtagtatagcctaaagtcaggtagtgtgatgcctccacctttgttctttttgcttatgattgtcttggctatacaggctcttttttggttccatatgaactttaaagtagttttttctaattttgtgaagaatgtcattggtagtttaatgggaatatcattgaatctattaattactttgagcaatatggccattttcatgatatttattcttcctatccatgagcatggaatgtttttccatttgtgtcctctctgattttcttaagcagtggtttgttttcattgcacaccatgattcccatagcctacctgagttgtcttagcatggaatatgtggactgatgtttatgttcatgattcttatggtgagtccatgtatgcaggtagaccataggccaaattatgaaatagaaatcatgctccaaataaattagaaatatagctatataaaaaaggctaacacaggaaggtgatggaggatttgccgtattgtcttcttttgaccagtgttcgggaaagctgagttttcaaaggcaccttattcatttgctttaccaagactcgaaacacacaacctagaagtgagaacactgtgtgctgtgcatgcatgtgcagctcagctttctgactctggatcaagagttaacgtttaaaagtgtttaaggcctattctatggaaaaggctttatttataccactactggtttgagtcaggtataaataactcaagccagtaggtataaagcctcctcttctggtagcctgaggagagtggaaacagatgaaaatacaaaagatcaaagtagaatccaataatagaattttgttattagtgcctaagatattcttattactgattactatattttttgtgaagctttttgcagtccaggaatactgtacttgatatagctgttgcatttctggaaatttgaacatcaaatttcagtgattttcattacgatgtcaaaggtgatttagtttcatttaaaataagcatttgattggaatgcctaatactttagaattaaggctctctatgctaaccccatctgtaaaatagctattgattttaaagcacataacacactcaagtatctacttttttttttttttttttttttttttttttttgagacagagtctcactcttctcacccaggttggagtgcattggcacgatctcggctcactgcaacctctgcctcctggaatcaagagattctcgtgcctcagcctcccaagtacctaggattccaggtgcccaccaccacaccaggttattcttttgtgtgtattttcagtagagacagggtttcaccatgttgaccaggctggtatcaaactcctgacctcaggtgatccgcctgcctaagcttcccacagtgctggaattacaggtgtaagccactgcacctagccaagtatctactttttgaataatccctttatatgtcccttttacaaagaaataataatttcatttttattcagttttacctctttttagtataaatacagtaagctttatatttgtgtttcattcacatgttatacaatatcgttttagcactagaaataggtcccaaaatggagactgggaatgttaacattagtaagaataaaaacatattggcacatttctctaacatttgaggttaaaacatatataatcatctggctaccagcagtagtcattggtcattttcctttgaccaatgaatcaaaagaaatgttttctggagaaacatttgaatatacctaagtagtttagagcttaaagttatgtttaacatttagatgagaagccagtagggtacagtggagaacaactcagatatcccaaatcttaccagcttgacaatattccctggcttctctgcaaatttgtttaaatggagttatgaggaatcaatacgattatttgtgcatatatccattataatatttggcacatattagatacataataaattcagttgaattgattctgggttatctcattatgtatcacagaatcaaatttttccaatatgtataaagttcattttcattaattatattacagcattatattttaagttcatctgcctttatttcagatttaattggacatgctcagaatgtaggcccttgatagtgtttaaatatccactattaatacctcaaaagactatatggcatcaataagtaacacaactcatacagcattatgaacatatgcctcaactaacatttaggtaccctatgaataaaatagcatatctagtaaatacaagaatcccatttgcctttcctcaaccaccaaaggaacagagaactgtttcacataaaagctcggaattaatgtttaagattcatcagtacctagcttgccttctctatttatatattagatgcttaaagtaaattagcactgtaaaaagtacagtttctctttggtttatcctttaattgagagcagaatgatatcgctttgcagatgttcccaatcttttgcatattcatttctctctcctccctcttggttaacgtgttccttttgtgtgactaatgcttgatgaaccccatttctaatcttcagttattccaccctcctcggtttttattcagattaggtggcagaattaaagggatgaatgatgattttctgctgtgattaaggtaaaaatacaattgcatctggaacaaatggatataaaatacctcagccatattggaaggcttctctaggcctcatttttcctccattagacattagcatttaggctatttgttttacagtgtcaagacttccagaagataccatcattacactacttagttatagatttagagaacagtgagcagtgataacctgttatgcttgcaaactgtcacttgggcatcttccattccttgactatgctcttcagtagattaatgtatctttctctttgtgaatagttgcaaccagagagtaaacatcatcattcccattactaaatcaattatcttgatcccaattccgtaccttcctctgagctcattcctttggagtcagttaacatcaaaaatgaatattgattaaacctcaagaggctatagagaaatacaagagattcatgtgaaatgagggaaggtgggattcagactattgttagtaagtatttcaaaaatggttgcatttattttttctaaactaatgtttgcaggttgaagtctgcacaatatatgcctgcgtgaaaagcaatggaacccaaattaccactgtggaagacactccaagtgatataccaacacccacaattcgtggcatcacttcaaggtacaaaattttgtgtcagttaaatctaaggaactctgatcagaagaaatgaaaataaaaatcaaaggtatcctctcagccatgacaatctcatttaatgggttattataagtatgtgtgtaaatcaaatttttgatattatttcacagatattaatcttcactggacatccaatggcatttaatctttaatttccctgattgcccagcctcagatttcttatttagtaacctgtaagcaaatacttgaaatacatgtctccttatttgaatgtgtcctttagtgaatccttttgcggagcataatacaagcttaattgtaatgactaccttctaacttaatctttttgaaaaaaaattgatttatatacatcagagtgccctaaagctagaaatctgtaaaattagtagggcagataatgtttagataagcattaccaattttgtcagcttcttggtagaatcactttatttttctttattcttttgttgctgagaaatgaccatagtttgaaagcgagtctctttataattcataattagtaacaacaacaataataataatatttggtattgtttccaaagctgaaaataagatggtaaattgttcatccgtttgtatcaagttgaggctgggaaaagaaatcttagtgctttcacattatactttttgcttaagccaaatgaatcacccttctcttacatgtgcaaacaacacacacacacacacagacacatacacacactgaaataataagtctattattaatgtttcaattctgaaggatttctctatgacatgttgaaatttctggatcttaaatcagttcaaaaaattagtactggttttggcaaccaatggttaaaataattagaaaaattcaactaacctgactgttagctgttcgtggcaataatcatatcttgtctgcttgagtatatcttctatcaaacacatgatagatactgatctaatttttggcatactaattagtttataatccccccagcagatatcccccaacctattcacagtattatctactatgcagggaggaaatagtcatattaaatgggcgttagagacctttattctttagcaaacacatctgtggctataataatatagaaggcaaggtggggcgtggtggctcacgcctgtaatcccagcactttgggaggccgaggcgggcggatcacaagctcaggagatcgagaccatcctggctaacatggtgaaaccctgtctctactaaaaatacaaaaaattagcagggcgtggtggggggcacctgtagtcccagctactcgggaggctgaggcaggagcatggcgtgaacctgggaggcggaacttggagtgagccgagatcacgccactgcactccagcctgggcgacagagtgatactctgtctcaaaaaaaaatatatatatatatatatatatattatatatatatatataatatatattatatatatataatatatattatatatataatatatattatatatatatatataatatatatacacacacacatagaaggcaaaagtaatacaaaagagcataagacatgattctaaatttgcaaagttccagtccactggggaagatactcccctaaataaatgtttatagaacaatgtaaaaaacactataataagaggtttagatgtgcaagaacataaagagaaaaatagcaaactttacccagaattatcagtgaaggcatcatggaagatgtgacctttgacttcagtcttgaaaagctcaaggaagaattatagttaggtgggtggatgttttcaaattcttgtctgctggcatccccatgactcaagcccatgtgaatgacgtaacagaatatgcctcatagtacatatttatttataactaaaaataacgtctaagctttataagaaatggaacaaatgtgactgtgtctctaggttttttttcctttaagaagattattgcacataataacagaggacaaatatttttagttgctattaaaaattgcttgtatccaaatacattaaattgatgacagaaacattaaaaagagtattatacaacaagaacaaggaaagtgagagaggagacaacaacagaaaagagattgcaacacaattttgtaagcaatatttgtcagaaagaagcaaatgatttaatacagtggagaaatttacaaccaaaatattggttgacaaaagacaataatgacaggaaacaaactgttttttccacagagaactggagaggctgagcacttagaagttttaaggatgtaaagaggaggagagagggtagggtttaaagctgaaatcatggggtgagacacaactgttaacaaataagtgtttggaatcccaggtctcttgcatctttgctgtgcatccaggggtctatttctcttcctccacatgacaaagtccaccgaccaggagattagacatttattctctggagaaactgagggctactaggcagaggggagctgagatgagacacagaagtaaaaacagtgataaagtgagactacaacctgaatggtgggctttttggctaagtttcccagttctgccctcaaaagcaagtagacaagtcataaacacctccagataggaaactgaacatagttttctagaaaaaaaagaatgatctcaaaaaaaatacctccagataatagcatatagggatccctaacagtaaaaacaacttgtcctctggtcacccagtagggaagtatgccaatcaacaaggctcacctaactataaagcttttagtcagctttttttttttttttttttttttttggtgcatcactcttaaagataaaaaggggaccaaaataaacaaaagacatgatacaatagattcagagataatgcaggtgaggaaaaaaaattatagcctcagacagataaaagaaaattctctaaccataaaacaaaaccagcatacttaaaaaaataaataaataaccaacgaggagaaaacttcatggaaattaaaagggtgaaaagctgaattgaaacttttgaagaaagttcaagggaatgtctctgaaaatgcaatgaaacacaaagatttaaaagagagagagacaaagaaaaaacaatagagagtatccaggaagtctaatatttgaataataagagcttcaaaagagaatcaaaggaaaagagggagaaaatttaaaaaaaaaaaagacaagaaagtatcccagaaccaatgtactactgtgcagatcaaaagattccctggataccaacaatatgactaaaaagtgattacatataaagggatattatcaggaaattgcagagtaccatgtttaaaaagcacatccaaaaagctgccaggaagaacagacactaccacaatcaggatgtgaagcagcatcatgatgtcggtctccattattgctaacccctcttctacccttcctaaaactaagcaaacactgccatgttttgttatgtataattctgccttttccatattgtcatgtaaatggatcacataatatgtagccattcaaatggcttcttttagttagcataatgcatttaagatttgtccatcttattatatacatactagcagttgtatacatactagtagttgtcagtttttgttgctgagtaagattccattatatgaaagttctacagtttgtgcacagtttggataattttcagttctccgtgaccacgattaaagttgctgtaaaacatctatatacaggtttttgtgtgaagatatattttcatttcatgtgggtaaatacccaggagttggattgctgagtcataaactgccagactgatttacaaagtgactgtaacatctttcattcctactagcattgtatgagagttcaagttgctctacatttttgctagaacatgagatactatgaggtgttttcctcttattttttaaatagtcattttaatagatgtttgtggtgtgttattatggtcttaaattacattttccctaatgactaatgatactgataagctttgcaattgctttttgcatgcactttggcatttgtttactctgggaaatggtatctccaaatcttttgcaaatttcttaattagattctttgttttcttattttttgagttttgaaaattttttaaatatattttggatttgagtttttgtcacatatgtgatttacagatatttcttctctaccttatgatttgttttcaattatcttatttgtgtgtttttaagagaaagagttttaactttccaagagagttagatttgttactttttccttgacagtttgtgcatctggtattttatctaagaactttttgcctgagttaaggtcacagagactttctcttgtctatttcctagaacatttgtatgtttacatgttgaatttatgtctatgattggttttgtgttaatttttgtatacactgaggcatgagtcaaggttaattttttttggcatgtaagtatttaatagtatcaacaaaatttttggaaagattatcttttctttattgaatatttttagatttttgtcaaaaatcaatttaaacacgttttgtaggccatttttggactctcttttatgttcaatttatcaatatgtatatctataccaatatcgcacaatcttgattactacagctctatagtaagctgtcaaatcacattgtatgagtcctccaactttgacctttataaaaatcattttggcctttctcactactttgcctgtccatataaatttcagaaacaggtcattgatatctacaaaacatgtgattttgattagaactgcattgaatttgtggatcaattggtagagaattgacatcttaacaatatcaaatgttctgattcaagaacacactcttgctcatttatttgcatcttctttcctttattttatcagtgttttatataatccagtatgcaaatactgcacatattttattaagtttatacctaattacttatttggggggtgctattattattgtttctttaaaacaaattcaaatccaattgttgctagtgtgtagaaacacaattaattttggaatagtgagcttacatccagcaaacttgctaaactccttgtaagtcttaagagcttttttgtaattccctagtctatatagatcttctacaaagagaaactgtttatttttttcatttccaatcagtatgtcttttatttctttttcctgccttattgcactggatagtttaataacgtgataagagcatatccttgacttgttcccaatctttgaaagaaaactttcagtcttttacccttagatgtgatgttacgtatgaaatttttggccatgccttttatcacgttgaagaacttactttttatttttaatttgctgacaattttcattataaatggacatggaaatttgtcacatgcttttttgacattttaaatttgtactatgatcgattatatttactgattttaaattattgaactagtttgtattcgctggataaccagaacttcgttgtgacatattttcttcttcatatattgggggatgcaatatactattatcttatagaaaatgttcatctgtgttcataaaatatattggactgtgtttgattttcttgtaatacctttgcctggattgggtatcatggtaatttctggtctcatactaacttgggaagcatttccttcttttctattttgtggaagagattgtacaaaagtgttattatttcttaaatcttggtaaaattcaccagtgaaacccatatttgcctggagtttttctttgatggaaggttttttaacttggaattcaattcccttaataatgtatgatatttggcaatttattctccagtgagtttagtcatcttgtgggtgcagaaaataggttaatttaatcaaatttgtcaaatttattagcaggaagttgtttgtagtatgtttgtactacaaacaacaatttgttgcaattgattttattctttcatttctgatattggtagtaagtgcccccgtttttctgttcagcctagagttttatcaattttgtagatcttttcaaagaaccatttttggctttatttattttctatatcatctacattgttttctattttccatttcagtgatttctgctctctattgttttcttccctcttgccttgctattgcttctctagtttcttaaagatgaaaactttcattattgatttgagacctttcttcttttctctcagtcctgcttcggtatgaagctcacaaattttgaaatgttgcattgcacttcatttattcaaaatatattttaatttctcttgagacttctttaacccatggattatttacaagggtattgtttaatttccaagtatttggggatttttcagataagtttctatctgagtttccagtttaattctattatgatctaagaacataattttagaattccaattcttttaaattagttacagttttttcagggcccagaatatgatctatcttagtgaatggatgtgcacttgaggagaaggtacagtctgttgttgtcagatagagtgttttgtaaatgtcaattagatcaagttgagtgataatggtgttcagatcatctatatacttactgattttctgcctgcttgttttatcagttattgtgagaatggtgttgaagtctccaaatgtcattgtggctttatctatttcttcttcagatctattagtctttccttcatgtactttgatgttttattattaagtgcatacatgtttaggattgttaatgtcttgataaactggctcttgtatcattatgtgataagcccttttacttcctgataatttccttgttcttaagtttattttgtctaatattaatatagccactccagctttcaattgcttagtgtaattctgggtgatttttcgattgattccttcacattttgaatattacgttataaaaatctgactcctgttaaaatcctttgaagaaagttagagttcttatttacttttttcagcaggttaccaactggttagcttcagactccaaattctgttttcctttgccagtgactacagtcagttcctattttttcataaagtagcataacaaagctataaactttgctttactactctgtgtctgcacaatggctaatttgggatttggctgtagaattatgtaatagttctgatctcaaaatcttcgctgtgctgcttgcataggctatgcatgtgaggcaaccataaatgtgcagcttggagttgagtcaggacttgcgttcgttcattcataaaattagcttctagctttcttctctctgaaatgtcccccatctttccagctcctttggacttccttccctggatttttggctagaatgatatgatttcttttgaaatgtttgcctcccagcctgcctccaaatttgcataactggagttgttcttaggcaatgaggtaagaggaattcgagaaaaaaaaataacaaggacttcccccacattctttggactatagaggccccatttcctgatttctctggacagaaagatttttccccccgttggggctttagattccaatttggccacagctgccgcagtgcagctccttggctctgatcatcctcggagcagggcccagcagaaagaagacaaaacaaaacaaaaatgggggttttccctatactctctggcttgcaaggcattttgttctagatactctagccggaaaaaatttactttctctaggattttgcttccctagttcacagtttcacactgatactgcccttgggttaaagatgggaagtaaaggagggggaaaaaaaatgggaaactcaccctgtaacattcattcttaaagttttgtctcccctcctgatcagccttattgttagcttttcagagtcctcaggtagttactttatataatttttgcagatactgagttgtaatcagtgggagagataagctgtaatgggcttattccatattggcctgcatgggaagtccccctccaccacagttttctttcttccaatgcctttggcaactttccttttcccccccagtcagaagcctagcaaaaacttgatagaaatcattcataaccaaatattggcatgtaaaatctttcctttcttaaaatgatccatagtagcagagtaacattttccaaaggcaagactctaatgagcaactataggctgccaagccattaatcaaaattataccaacaccaaagcagttagccttgtgtgtgtatggtattgtttgtgtaatttcattatacttctggcaatgtatacttgttagttatgtttctattttggttttaaaaaatctttcatattagcaacatgcaaaatgaaatgtgaaatccttccagaaaaacatcagcagacggggtctacttctctagcatttaaaataatttggtttctaagaagccatacatttcttagattctttgtttatttttggtgaaattcagaagtcagtaaaatttaactcatatatttcaataacatacagatagcataccagcctgtttgattatatgcgtgcagtgtaccaactcatctttgtctttggccttaacttatgccttgtttttgactacatcttcagcagtacaagcccttatgcatgtttttcctcttatatataaaccaaagattccatagcacacaaataatatagaagaatcaaatggacccttctagttttataagctgctgcttcagagacaagccctgtttctacattgcattttccatacttctcatattatcatcagctccttctatatcccaaaagaatactaactactgatcgataacccggacatgtctggccatggcctacatgtgccctgggtagttcatttatttgtcttggtggatttgctagagtggaatttaatcaatagctaattcattaattctggtcctcgagaatgtagagactgacctggatgaagataacgggctgggtctggctttgatagaaatatgacaaacactgcagctgacagcttcactaggtactgtgctatgaagtttagttatttattccccataaatggagacactaagaaaataacacaaacaagaaagatgttttattacattactgttagtattccaaaatgcatcatttccaggcatgaggctcaagggaaagtagagaaagaactcagatcatgtcttttaatgtctttaattggaaccatggcagttttttcacatccaaatcagtttggggatgtgttattgataaggagtgtgaggtataaagtcttcgtagcactcacaaataattgttttaagatttgcttctagatgctgaatgagatcaatgatattcttatacacaaactttgcagaaatctttctgataacagcataggttagatgtctctaaatgaatgctaaaccactatcgttattaatgaatatctatatatttttttcttttttgttgttgttgttgagacaggatctcgttctgtcacccaagctggagtgcagctcactgcagccttgaccttccaggctcaagcaatacttcctcagcctcctgagtagctgggacaataggcatatgccaccacacccagctaatacatttttaaaattattttgtagagttggggtctcactgtgtcgcccaggctggtctttcgaactcctgggctcaagtcatcctcccgccttggcctcctaaattgctggtattacagatgtgacccacacagcacccggcatccccctatatttttaaattacttaatgtggggttaagtatggttcaagaggtcagagcttgtggagaaagaggattctccttttttcctcaccaaattttatgagacatgctatgatatactttttatgctatgacattagatatcagggaatctcttctatccttgattttttctgcctaacttttctcagtgaatgatagcttcaactgaagtaatgattttacagttttgtaaaattaaaagaaaaaattaatattttacatttaatttaattatttaacattacaagaaaaaattaaggccacatttctgtttgtttgctttaatagggagagtgttgggctgaaggatacagaatgtcaaatcacttgttttcacctgtataccaaacttgcttaccaatatgggcaattgtagactatttttaatatggactaaaactgtctgcttaaacctttaaaggatatgggtagaaccttgaaagagagaatttggactacactaagtgcaattcgtacagatccaatcaatagccttatggtcaccatggcttttaggaaatattactcatttgatggccatgagttctgattatcacattctgtttaaggagaccttaatagaatagtgtcagaatatagaatgtaaacagaaagacagaatatatagaaaagagaatattgggcttattattatggctctgctatcactattttcatttccttacctccctcttcttcccaaactcctcctaacttctttacctcttgtagctcccatagaaacagctcggtcgctgaagtagcctttgagtgcctttcagcaaaatccagttcttcctcctaattcactttagccctcaactgccactttgtccctggttctctaaacattcattgttttgttttgtttttattggttccattaaaaacccacttatgcattctgggtgtcctcaggaaaaagactccctaccttgctcaggtagttcagtcttgcaattttaagccatactgatgtctcaaagatctctggccctgttttcttcctaaactctaatcccacatacccacttgcctattgattttatgtcatgatattcacccatcacttccataaccatgagattcacaagttaattcttatctaactcatcatcttttccaacactcacttctgcaaatgtaccaccatcctgcatattatcgaggacatatatctttgaagtatttttaatcccctaagtttattaaacactgattttagtacattttctgttggagcatcttctcatatatgttactcttctccatttccaccactaccaccctggttcatgttttcatcgtttaagtttatataaccattttatggagctgtcttaatccaattagatacaaagagaaaaaaaaatcctttacttttcacctgctacttactgccttaaacacactgttttggctatccttccctcaattctcaaataccccacaggaacatcttatgggtttccaattatttttagttatgagtctcactttgataattaagattcatgatcaagtattaaaaagtccattccatcaccatcaaaatattagcctcgcatctagttcaaagattctatcatttctaaagctcaggcctaattgtagcttgctcttttcttccctcttactctttctttcctattccattttatccaaatatgttccctttcaattttattacttcactgccatcactgtttgacaatcacagctctccattggcaagtgatgctttcttgggcaattgtatgtttttcttgagaggtcctcatgagaatctttgaatagccaaattccctcacacgagtgttgccctttatagctgatcacttgtggtgccaaaagagcagaacattccaaagactcttcctgctggagtctcctcatgccagaaggccactgtcctgggccatgtaccttcaagttagctcaaacctagccatcttgcaaggcatccacttggctcttgagaaactcatccatctatgccatgctatagatcaatattgtggtattctaggcttaacctttcattgcagaactgctctggccaatctctggccactagaattctctaactgagaagtaagctttatttcctatgctcatacagactgccaaatttaagagttccctgtcaagctgtcccaagatctcttcaccacattttcctccaaggacaaaaggagggaaatgtgtgttcctttttattaaaagaacatgggttttgcattttgactttttacctactacaatttataataaacatctcagtaggataattaaatattcagtgacttgacttgaaagcaaagaattaaatttgtcatattacatttatttcatctttgttaaaagtgttctgatcatttttgataaccatgatctggaataatattgaagaacttgagtgttacataaatgattgacaaaaatgaccaaatcgattagaaaaaaagcctgtgtaaacataaccagataatctagagctatttaatccataacaatttaggttaatatcttagagtgtatgaagatttcttttctctggtcaaacaaaaatgttttgaaaaaattggggaaaaatattagaatgaaatgttaaagaatagtaatgtgaacctgtcttcataaaaatttgatctgacttgtatcattttgatattcacctgtgtaaaggtaagtgatatcaaattattttccctacactcctttgtatcttcaatggtattttgtacttcaagggacaactggaagtgatgagatctggggagggtgaaatgcatctgtaatcctaactagttgggaggctgagtcagaattgcttgaggccaggatttgagtccagcctgagcaacatagcaagatcccatctctaaaaataaataaagaagaaagtgatgacaactgtgggggtggcacaatagtatgtagtagtaacagtaataaaatagtaattctgctgacaatatgacataattaaaaagaaataactacaactagaatgtctgaacacttgatgaattcatgtaccaaaatatgtgtaaagaacttccagttccaaaatgatgacatagaagcaagctggcttcactcctctccacagaaaacagaaacaaatgtacagaactgagattatcacagcaatatcccagaactcaaatatgaggacaagacagttcccaaagtcacagagaagtgaaaatctccgagcagatggtaagaaaattggactttcatatccacaatgcccatctccccaatatattcagcaccacgcttgtggaaaatattttcctgacccttgatttctgcactggaaaagtgcgattgaagtggacagtttcccgaccgtcttaggttacctggcaggagacctttacctgcctcaacccacaggaagcatcaggagtgcccgaagggctctatctctgtgaggacatccagagacaatgtggggagatgggactaccatcaccagccctggaaattctgctctgtaactcagtaaaaggagatgccaaatcagagtggctgttcagcagcaccacactgtagtagttttgctccacaggtttcctgggcaccaatcctcagccagcctcctcacactaccaggatatcccctttggaacctcccctatttgggaaaggtggtattctgatagtttactggagacaaggcaaacctggacctgaggcaccatctagtgccaaaaaggaggcagtgacccagtgaattaaaaaaaatgaaagaaaatgaacagaaaaattacaaagaatctctatgcaaacatacctaagaaaaaccaaagcaagccagagaagactgcaataaataactaatccttcaatgcaaagacatagacatatatccataagaaatggagagaagagtaatatatgagaggatgctccaaaagaaaatatactaaagttgctgtttaataaattcagggaattaaaaataattcaaagatacatatccttgataatatgcaggacggtggtgtgtttgcagacatacaacttctttaaacagggaagtaggatcttctcaagctgacaaaagcaaggaaacagtgagtgaccctaacaagatggtgataggtgaactctatgaccaagaattcaaacagttttaaggaaactcatgatcaccaagatagtacataagataaattcagacatttctcaacagatttaacaaagagattaaaatggttcaagaaattaaaaaagaaatcttggatctgagaaatacatctgctgaagtgaaaaattcattagaggctctcaatagcaaactagatcagaggaaagcatcaacaaacttgagacaggctatttgaaaatacagagaggtggggataaaagaatgaaaacaagtgaagatcacctacaaggtatatagaaaactacctgaaaagacaaaatctaggaattattggtgttcaagaggaaggtaaacaagagcaagaggtagaaagctttttaaaagaaagattaacagaaaactttgtaaaatgtaagaaacagagaaatatccagatatagaaaggtcagagaagaccagatttgattaaaataagattattccaaggcatataacaatcaaattcttaaaggtcagtgacaaagagaggatcctaaaagcagcaagagaaaagaagcaaataacatatttaaaagcttcagtttgtttggcaacagtctactcaacagaaaccatacaagctaggaggaagtgggatgacattttcaaagtgctgaaataaaaaaacaaatgccatataaaagtactgcatacaataaagctatccttcaaatatgaaagagaaatgaagtccttcccagataaaaagctgaagtaatttaccactatgagacccatcttataagaaatactaaagagagttcttcaaactgcaagacataaaaaactaatgcacagaaagaaaacatttgaaagtaaacccactgataaattaagtacacagacaaacccagaatactctaatactgtaattgcagcatgcaatccactcatcacttcagtatgaagcccaaaagacaaatttatcaaaaacaatagtaggtacagcaacgtgttaagagatagacaacataaaaatatacaaattgagacgacataaagtcaaaatatggagaaatacagttaaattttagagttttttcattgtttctttgtttttggcaaccaagtacaataaccatatgatcatttcaatagatgctgaaaaagcatttgataaaattcaatatggctttattataaagtccctcaagaaactggatatagaaggtgcatacatcaaaataaaagccatgtatgacaaacctatggctaacattgtactgaactgggaaaaaatgaaagtctttcctggaagaactggaacaagacaaggatacccacttacacttttattcaacacaatactggaaatcctggtgaggcaatttgtcaagagaagaaataaagggcatccaaatcggaaagggataagtcaaattagccttgttaacagatgacatgctcttataattagaaaacctaaagactccaccaaaaaacctgttagaactgatgaacaaatttagtaaagttgcagaatacaaactcaatgtacagaaatcaatagcagttatatacaccaacagcaagcaatctgaaaagaaatcaagaaagtggtcccattaacaatagctacaaagaatataaaatacctaggaatcaatttaactaaaggagtaaaatatctatacaagtaaaactataaaatgctgatgaaagaaattgagtaagatacaaataaatggaaagatattccatgctcttggattagaagaattaatattattaaaatgacaattttacccaaagtaatttacagattcaatgtaatacatatcaaaagaccaattacattcttcacagaaatagaaaagtatttctaaaatttatatggaaccacaaaacacccagaatagctgaagcaatctgagtaaaaaaaagacaaagctggaggcattacactaccttacttcaaaatatagcacaaacctaaagaaaccaaatcaacatggtattggcataaaaacaaacacataaaccaatggaatagaatagagaacccagatataaatccatgcatttacagacaactcatttttaacaaaggaaccaagaacttgcaatgaggaaacagtctttttaataaatggcactgggaaaactagatatccatatgcagaagaatgatagaagagacagaagagatagacccctatctcttaccgcattcaagaatcaactcaaaatggattaaatacttaagtctgagacctgaaactgtaaaaccaatagaagaaagcattggggagatgctcccagacatgatctaggcaaaggcatttgtgtaagatctcaaaaacactggcaagagaagcaaaaacagaaaaatgggattacatcaggctaaaaagcttctgcacaacaaaggaaacaatcaacaaagtgaatagacatgccatagaatgggagaaaatacttgcaaactgtctatctgacaatgaattaataactgggatatataaatagcttaaacaactcaaaagcaaaaaacaaaaacaaaacatctgattaaaaatgggaaaatgatctgaataggcatttatattgcctattgcctattcagaagacatacaaatggccaacaggtatatgaaaaaatgttcatcatcactaaagagatgagaattgcaactcaaaaccataatgaaatattatgtcacccagataaaatggctttgataaaataaaaaagcaggaaataatggatgctggtgaagatgtggagaaaggggaactctatttacactgttggtgggaatgtaaatttgtacagccactatagaatattgtatgggggttcctcatgaaactaaaaattgaactactgtataatgtagcaattcactactgggtgtatatccaaaagaaaggaaaacaatatattgaaaagacacctgtactcccatgtttattgcagtgctgttcacagtagccaaaatatgaaatcaacctaagtgcccatcatgaatgaatggataaagaaaatgtggtacatatacacaatggactcttattcagccataaaaaagacttaactcctattatttacagcaacatggatggaactggaggtcattatgttaagtaaaataagtcaggcatagaaagacaaacattgcatgttctctttcatatgtgggagataaaaaagtgaacctcatgaaggtagagagtagattggtgattaccagaggcctgagagggtcatggggagagggagaggaagaatagattgattaatggatataaatttacagtttcaatgaagagataagacctagtatttgatagatcagtaaggtgatttatagtttacaatatcttttacatatttcacaataggtagaagggaataatttaaatgttgttagcataaagaaaagacaactatttaaggtgatggatatgccagttacattgatttgctctttacaaattatatgaatgtattaaattctcacatggaccctgaaatatgtacatctattatgtattgattaaaatatatttttttaaactccaggcttccccaagattgtaatccacctgtaatttaactgactgctagtaaagcctgttactttcagaggaaaacaattcaacctagagactttgcaaagtataatccacaatgttgtgtgtatgtgggctgtgtgtgtgtgtgaaggaatgagaaaatgtaacccaaacatttgagagagaaaaaaatgtgtgtagacatggtgacttttatcagaagttgtattaaggtatcttaaatttcagttcctattactttaaaatctaaaaaaaactataacagttatttcatgaacaaatctaccaaaaaaaattcattcaaatatttgcaatctgtttatgtttatgcatgagtgcccaaaagtatcttcagctctttttctccaatatttaacatttattcctgggattgaagaatgttccttctattttactcttaaacatcaaagcaatgaaactattaatcccgctaataatgatgcatatttctcaaagatgcctttcattttcagatcagcaaccaaaggagtttcaattgtctctccagttggctctaatgagagatgtacagatgttaaacccaatactcttcttaatcattttccttcgtgtacttgattaaatcctcaaaagcaaactgttcatgttcttgccgaaaatataggcggtctcacttaacagttatgttgcacaagaaagggaagttataatggcatggaacgtgctctacgtggtattttctagactttactagttcacgagcttttgtggataagtcaaactcttgaatgtcacttaaatgtaatcttttctgtagttgattatgcagagaatacaaaaggtatctgcagaatgtggaattaattttgaaagtttgataaaaacttcagaataatagctgtggctgtacaagtcatctatgaaactgttctctcataggtgacattaatttcctatctacagagttttattactgaatgtgttatgtttgtacccccacaaaactgaaataatagttttctttttttagcagtctatgaaaatgttgaggtttatcttgactgccgctttttaacataaatatttgggcttcattgaattcctaatatgtgatgtcacttggaattctgatagggtccagtaatttggcctgcaaagacatattttaccttaaaatgaaagggatagttgaaatgttattttacacgatagcaaaaaagcatccaacataagttgtgagatttttattgcttaacttttgaaatagaaggacaaggttcttatgtgcttgctttattccaaagtatatatgggaatgctaatgctttatatgtaaaatgtacgctacacatatttgtgattagttaatttttatggctagaaattctagaatcataaaaaagaactaatcttgaatgtcagagcttcacctatttttttaaaaacaatgagaacaaaaaaatcattataatttttatatttaccttgtgtttcacaaaaaggaggttttctttgctgtgctacactgcaagaatatgtcatgttcaaatctctggggctttattaaaaactttaactactgtcttcttatagagattattaagcaaatactaaagatagcatagatgtgtggtctaggcagtatttttctggcaagtagacctaagtgcagaatttaagttctgtaacattaacctgagactaaatcattttattcagggttgtctcctctgtgaacagctttatgttatgacctcatttgctacagcaaatgaaatattaatagatcattgaaaatgcagtaaagttttgatcagatgttataccttcattgtataccaaaccctgcctctcataaaaactttctacttgggtttaaattgaaattatcactcaattttttaaaatcaaacattttctttaagaacatgacaatgtaaacatatttcttacgggaatctttaagttctatatttttcaccaaaaatcatttcagaccatgctagttaaagagttattgaaaaaaaaaagaatctatttagatgagtcaaaaaattaagcaaagtatgttttaaataagttagtgactataaaatttctcaatttgggcatttattttgactgcaagtaacaaaacacctgacaaaagagacttaagtaaatagctctagatatatagttgactcttgaacaatgcaagggttaggactgctgatccccacccagtcgaaaatctgcatataacttttgactgtcccaaaatttaactactaatagcctactgttgaccagaagccttaatgataacataaaaaactgattaaaacatagtttgcatatatatttatactatattcttaccataagtaagctaaagaaaagaaaatctcattaagaaaatcataaggaagagaaaatatatttactattcattaagtggaagtggatcatcataaaagtattcatcctcattatcattatattgagtaagctaagtaggagaagaaagaggaaaggttggccttgctgtctcataagtggcagaggtggaagaaaatctacatgtaagtggatctgcacagttcaaatttattttgttcaagagtccgctgtggatagttgttggcattggtgaaccaatgccaaatataatggcggcatctttgtgattgttttggccttttcaaataactgaaagatgattgctgaagttgtagacatcatgtttagcggaaagaaagagaaaaggagaaggtggcagctctttcaagaaagctaaaatttcctaggaacctccataggagtcccatcatggtgttcccgtggcatctctgagcagttatgtttcatatcacaactcctaggtaaagtaaggcaaaggagaagcaggttagaagtaggcattaagttgccacatgttctaattgtcaccttgtttaccaagtcatgtatgtcttatctttgcttaccaaacaaaatgctctgattttcttgattagccatagtgacacttgcttcttgtctttgaaactgaaagtaataaaccacctcacgccatgtgttattcttccaaaagctaacataattttgattgatttgaaaatatatgatttcatatataaacatatataattatatatatatattagtatctattgctgccactttttacttaagactgatagcatcaatgttaaatagtgtcttttcagaagtattgattattctctctgttgcagatctcttcaaattgattgggtgtctccacggaagccaaatggcatcattcttggatatgatctcctatggaaaacatggtatccatgcgctaaaactcaaaagttagtgcaggatcagagtgatgagctctgcaaggcagtgaggtgtcaaaaacctgaatctatctgtggacacatttgctattcttctgaagctaaggtaagtcttttctaactaatcagtgaaccatgtttttctcactcaagactccaagtgaaattattagcttctcacaccatgatgtattatgatcaatatttccactactctatgaagaagactccacggaaaagaaaggatgcttacaaaaatcactatcaccctcatgagcactttagccttcccattttttattatcttcacaagaaatataaacttattagaatagggtacatcccaaattttatttgattgagtgacttaaaattttctttacaacagatcttttcagctacaaataggtgtttgtttatatggcactgatgagtaactgtgaggaggacattttatgatttgtcagaaatattttagcattatagtcatttgtagattaatgttcatattagatgcggtttagaaatcagatcaataatacagccagacagaggagtttgtaaatgacttttattgacaaacaacacaaaatccttagtttgaaggtagaattttatataatgaaataatgttcctatttggcaacaacagcatcacacattcaatggctaaagctactactaaatttataagatttactgcaaaagaacaccataattaagaaagtgagttactgaagcaatatggatcaaaatacaaattattatggctgacacaaatttagcaggagttatcatctaagaaatgcataaagccagcagttactaactgtgcattttttgatacttagactctaaaattatcattatgcctacatttgacatcattttatgccattaagtatgcacatatttaaatacacacatctgatgaacatatttgtataaaattaaatttgggatttctgagaagaaaaatactaaaataaatttgcccattaaacatatcctccacttaagaaaaacttgggaaaatgttggcaaaatacggaattcacttctcaatttttttctttgcttctattattttaatatttattatctgttacgaagtggacaaagagagaatagttgtataggcatacgaataaatgatttaaagtttgtggagtgcagaaaacaatgtgttccatcaaagtaaaaactgattctggccagaaactgtcatagtagtttaggtgtgtataatggatttgataagtttcaaccctataactttagtggcaaaatcaaagctaagtagagtaaaactagtaaagataatgtttccatttaagtttattctaaaagatcaaaaggtggatgttcttaaaatgttcatattaaattagaatatacctgagatagggtgaagaaaaagtaatgggatgaagaaaaatattaataaagtattaacagaataatatttacctatgtttaggctaaattatttataaaattactcctacctttctttatgctgtgatttcagaaaccgctttttgtaacttttaaaaatttactgaagctttgtaccaaataagtgactggttggtgtaacattcctaaattcagtgaatgacaaagaaccggttagtttaattttaaatcaatttaaaaatgatttagacaaatctactctacaaaaaaaaaaaaatcatacgggtcaccttttatagaaaataaatgtaaattgatgaatagggaagcaaaagttaggctttagaaaacaggcgtgtgcaaatctcaccacatagtcttgaaaagaaacatcacatttggttattcttataatgcaaatgtcataccttattacactaaaacgagacacactatttaatgatgccttaaacaaagtcttatttttattgttgagcttaaagaggcaacacaggtattgcggtaaaagagaataaaggatgtcagttaaatttcaaaaaaaaaattgtaaagttcagtttgggactaggtactaatacacatttcctagcatgaaagattggagagaagtagaaaagagacttgtattgcgggtttaaaagctttttggctaaatcactgtaaacatcaatgtttcccaaaatacttaaacaagctttaccataagattacagccatggttcacaaatcccagtgaacgtaagacctgggggaattgttaaaacctaggatttcatagctctagtcccagagattctgattcagtaggtttagatttggctgtgaaaatttgcatttctaaacatgttcccaggtgtcttagttcgttttcacagtgctataaagaattacctgagactgggtaatttatgaagaaaagaggtttgactcacagttctgcagacttaacaggaagcatgactgggaggcctcaggaaacttacaatcatggcggaaggtgaaggggaagcaaggaccttcttcatgtgatggcaggagggagagagagcgaaggggagagctgccacactcttttaaaccatcaaatctcgtgagaactcactcgcctttagacctacaataaaagtctctttcctacttctctccaatctttcatgctagaaaatatatattcatacctagccccaaatgaaatttacaattttttaaatttaattaacttcttctgttgtctttcactgcaatacctgtgttgcctctttaatcccaacaataagactttgtttaaggcattattaaaattttatataataaaaaatgtatatatttaaatatatctatttttattataaaattttatataataaaagatctatatcttatgtatatatacatatgtgtatgtgtaagatataagatatacatcttatatcttttattatataaaattaaaattttatataataaaataaaagatataaaattaaaattttatataattaaatacatattatattatatagtattataatagagcacaaagcatggttgaagacttcaaaaaagctgcattctatcaaataacatttataaaattcgaatgatcctggaaaatacatttttaaaccaacgaaatatgagtaatatggtctcagatcttctatgccttacaagaaaataattatattacatgagatacagtggtataacactcttaactaaactgatatttctttaaaactgttttcaaactttcaggtttgttgtaacggagtgctctataaccccaagcctggacatcgctgttgtgaagaaaagtatatcccgtttgttctgaattctactggagtttgttgtggtggccgaatacaggaggcacaaccaaatcatcagtgctgctctgggtattacgctagaattctaccaggtgagggttatttccaggtgtactcaaaaactatgggaacctgaaaacataaacacgtggttcatgtcagtgaactatttcaaacacctccctctcaacaaaaattgaaccataaacacatagccaatggcctgctctaaatattgtttcttccttctgctttgttaaaatataagcaaggctaaatattagaaaacgagagaacagaaggaatttacaatatctactacagaaagaaataaatctggagatctggctaactccttttatcttgtggctttttttattaacatgactatatattttcactattaaatatgtgaattgctgactgttccaccccatgaagctgttccccacttcctccatttctaatctgaactacacatgcattgttcttggatagatcgcaactgcaaatttcatttgtctgagaattctaggccactggcaatattctctcatcataagtcaggcaagggaaggaagaatgctgcaaagggtagcaaactggattttttccttcatccctttttagtattagccaacttagctagccattttgctccaaatttcaactacataaaacaatgcctagtgaatataattgggaatgatgctaataataactgccatttttaaagtaccaagtctctcgcaggctctgtattgaagactttacatgggataccttatagaatcttcacaactccaggaaatttgtattatacaaggcagtttacaagtaaggaaactgttttagagaggatcaataacatatccagattcacagatgtgcatagaagtgaaagaactaaaatgtgaatataagtatgtctctcctaaatctatgctcttttgtgtactttactgcctctttaaccaaaaagcatcaacctcttttgacaatttttttaaaaggactatttaagacttctaaacttcttcattactaccactgtcagttacaatttatcctgcaaaagtaattgagaatacaaaagtaattgagaatacaaacttttttctactacttaagtttgatactgatatcttctttaaagagcaggaaatggatataggagaaagacaagaaagccaagttttttggaggccataggaaagctgaatactttgagatatctagtttagggtgaaatttatgcccaacgtctggttcctgtaaattatgttcagtataactatatccatccaaggcatgtgaaatgagacactgtctaacccagtgtctgttttgcaaaatactggagcaaatatagaaggcgtgcaatcacctgatgggttcatcttgcccattgcacagatagagccaatttaccaaaacagtggtattgcaacagagaaagagcttaataaatgcagagccagctaagcagaacaggaggttttactcaaaacagtctcccagaaaattcaaaacctagggtctgtctgggcacggtggctcatgcctgtaatcccagcactttgggaggctgaggcgggtggatcacctgaagtcgggagatcaagaccagcctggccaacatggctaaaccccatctcttgtaaaaaatacaaaaaattaactgggcgtgtggcaggctcctgtaatcccagcttctcgggaggctgaagcaggagaattgcttgaatctgggaggcagaggttgcggtgagccgagatggtgccactgcactccaacctgggcaacagagtaagactctgtctcaaaaaaaaaaaaaaaaaaaaaccctaggggtttttttggttggttttttgtttgtttttgttttttgtttgtttttttatttgtttgtttgttttgagatggagttttgctcttgttgcccaggctggagtgcaatggcgtgatctccggctcactgcaacctccacctcccaggttcaagcgattctcctgcctcagcctcccaagtagctggaattacaggcatgtgccaccacacccggctaattttgtattttcagtagagacaggctttctccatgttggtcagggtggtctcgaactcccaacctcaaatgtctgcccaccttggcctcccaaagtgctgggattacaggtgtgagacaccacacctggcccagcctagggttttttttaggatagtgcagtaggcatagggctagggaatgaggaatgcttattggttggggataaaattatagggagtcagagctgtcttcttgtccttagtcagttcctggatggggactataggatcagatgagccagtttactggtctgggtgatactagctggtccctcagaataaagagtgtgaaaaatagctggtccctcagaataaagagtgtgaaaaatacgttgaacaccaatcttaggttttacaatagtgatgttatctatggaagcagttgggaaggttaggaatcatgtggcctctggtgccatgaacacctaagccgtagttccttgtggctaatttgttaattttataaaggtgctctgccccccaagcaaggagcaagtttgtttcaggaaaggactatcatcagtgtttcgaagttaaactaaacacctctcatagttatcttggcctatgcccaggaatggacagggtagcttgtaggctagaagcaagatggaattggttaggtcacatttctttcactgtcataattttccagtgtcaggattttcttactgtcataatttttgcaaaggtggtttcaggtgtcctgattaaatactgctcaagttttctcaaggcagagaaccttcactcattatttttccttataattaatagaaaaaaaaagtttgtatagcagtgctgttatttcttattctctatcaaaaatatttcaaaattgaataagttctagtaaaccagattttccacttaagaaaaagtaaaaatatatatggaaataaggattttgtagaaaactgttaaacttcttcatactacagctcacgatgtcaacaatggatcaaatactgttaaatgctttactttctcgaagtaacttaaatttggggagttttcatgtatgattcatatctgcccttgattacaaatcattgctataaaattataattacagtgatcagatggacgttttgtgttgttcaattcctaccattcttcacaccagtagaccaagttgatcatggaactaagtaatagtgttttcatttccacatcacattaaaatttttatgttatgatttgcaacaaactattcaaactctacaaaatatcctctgtcccttaaaactaatgaaaaattcttagttacatcttcactgctgctaactcaggagactggcctgtgactttctcaatgctaacataagtagtcagattttgaaccgacagcacaatctacttttgttaggtttcaaaataaaatttaacatttttcttaaaaatgaaataactcatggaagctcagaagttgtcattgatattatataagcctttaataattaatttttagaccaaggatttaaaaaatatgtattgtctgtatgtataaatacatgtttctgcacacctaaagcattttaatatctaccaaaccattgagcatgccccaaattttgattcttttttaaatagttcatttttcatagcattagaatgcataccctggtgtcaagaaaaaaggaaaaaagcaatctcatgaaataatcaaagagtgttttgctccaatcattaatcccactgtacctaaatgaagagattattttgtgacctctgtcctcagccccgtggtctttgttagctagtttaacactggttacactgagggggaaaaaagcgcaatggtcccaaatcctgttgcatctaaatgtgatttaaatctggtcactagtctgccagttcaaggccaagatgggtataggcattttgatatttatggattagcctgaaatattggtaaatacgtactttattttttttctcatgactttcttccataacaccccataacaaacagcagaagaggaaagaatgctcatttctctcccttttttaataaatatgctaataaccccaagtaaatgttaatgtgggtcattctttgataagaataacaattaactgttagactgcatggtagtttttagagagaaaacattttcaagcctggcctgaaatagattcattttgagaggttaatgagaaggtgactgatccttgtatcttatgtctaatagcccctttttgaggaaaaaaaaatagttttattttttattgatataatccacatctttttttttttgaagacttttcttctgtcagtaactaaataagattctgagggattcagaaagacatagctaaaatatctaaaccaattaacatttattatgctcaaaagaggctttaaaaaaaagtattggctttcgccatgtagatgtgtatactatgtttcctctaagctcaccattgtcctgagtggtgtttaattaactgttgttgccctgtaccatgggatacattatcttaaagtttaccatagagggacattatgttctttgactgtgaagacaaaaaatatggcaactacatttcagacgaaatagaattattttacccaggggaagataacaaatacagtaactttactgtttacaataagctcgttgctccttcattggtctctggtagcatcatcatggaaacttttactaagttccctttttcttagagataccatattataggatcctttcaaagataattgactaagccaactgtctcctgaattctagaaattcatattttgagaaaatcctgagtatgtcttgatccggtcctggatatttaccctagagaaaagcaaatttatgtttacacaaaaacctgtacatgagggtttacagcagctgtaatcattactgccaaaacctggaaacaattcaaatgtccctaagtgagtaaatggacaaatgtggaacaaaggaatactatgtagcaataaaaaagaacaaagtattgataagtgccaagaagatatcaagcccagtgaaagaagccagtctcaaaaagctaccaactgtgagactgcatttacatgacatactatacaagacaaaccatagttttggagaaaaaagttgacaattgccaagggtaatggatgggaagggaatgtgactatacagggatagcgtgagggtgttctgtgggggtgatgaaactcttttgtatcctgatggtgtttcttcattaaaattcatggaagtgtgcacccaaaaaaactaatggtcctgaataatatttttaaatgaaatatttttaaaacactatttccattttacacataggaaaaatgggacatagaaacatgaccaagacactcagctagtcaaaataggaattttcatggttaaattttaggttgagctcctagagatggtgtgttttataataatgtgatgactgtgtatgagtgacttaatatatttttctcatatgttagtagaacagtaagatagcaaatatatttccattaaaattacaatgaacatccctatctttaaaagaaagcaaaaatgtcttagtcagtgatgactatttcaagtaatattttacatgatcacattcttatgaaagcataagttttgtgtagtgtttccgtggtttgatgctgaataattagtgaataagatattggttctggagtcaaactgcctggctccatatcccatttctttcacctcttagttgtttgaccttcattaagtaactttaggaatattagcagggtattaatgtttctgatgtccattgggctgctgagttagaatactcaaagctaaccctatcttttatatctaaatagaaaaaaaatgtttagtaattgaggagcatatgagtaaagagggctaacaggcctcctttaaatgacaaagtttctaatgaatctttccagagcaaggactcaggggtgtccactttcatcagatcatgtaaagggatagccagttcccaaaagctaagattcaaacatctaatgacctttgagatcctatgaaacaaaggatccttgttgatcctatgaggccaagcaattctctaagttgacttttagcaactagccagggaaagtcatgaagagcttccaaactttgaagagaaaaagactttccattttgcaaaatgtcacagcctagaatttaggtcctagaaaaagcattttgttctgacaaaattgacatttagagactttatgtcgattgtatgctaccactattgacaaatagagggaatcaatttttcaagtctatctggagaacgtgacagatgatcattcacatattgcacaacagttgaatcttataggggaaattaaatatcgctcagtttgtttcctattgctgctataaatcatgaccagacacttcgtggcttaaaaccacacaaacttactttatacatccaaatatcaaaagtttgaaatgggtctcattgaactaaaactaagaagttaacaagagctgcattcccttctggaggagagaatccattttcttgccttttccaccttgcagaggctgctcacattctttggcttgtggaccccttccattttccaggccagcaatgaccagttgagcctttctcacttcatattattaaacttaatcacatctgttgtcttcattcccctttgccatgtaacataacatagtcacaggttccagggattaggatgtggacatcttagggaggccatgttgtgcttaccatggtaaggtaatggttaagcagttgtgagaattaagaaagcattgtcgtaaactcttggggaataactgtcacaagtgaaacaaaaaaagatactgtgagcctgagtgcaagaatatatgaaaaaaatgctaagtatagatttgctataaattaagcagctgcctcagggagtggcagtaggatgatattagggttgggaactacagggaaatgggggagtgcaatcttgttaatgacacttaaatcttgtacaaagtggtacacaagtcttttatcattttgatagagtgaacagtgaactacaaggactggtacaggggataatggggtgttatgccaagcgaggtaactttctagaggtatgtagatacaatggaccaagttattaaatattgttctttttagtagattttgggacagtttcaagaaatgcatagccagattgatagacatctttaaggggttagcatcctgtatgaatcccacatctgagcagtttttgccccagaggatcttggagacacattcaaagtcagagatgttgataacaaaggcatcaggtaattagctggtgctaccaccaaattataggccaggcattcttctcctgggagttacagaaagagactttcaggtgcacatttaatgctggtatctcatttacaaagtggatctcttctcaacagatgcactgaagtggaattactaaacaaaaaatatgttgattcaagagaaagaaaagaaaaataaaggcagaatctgaaaattatttgatatgtgtaccgctgagacatttggttattcctagaaagggataatggaaaattagaagggtttttgatagataatatacctaccaccagtatcaatcttctatttttacaattgcatagaaatttctcactttctatgtcaagggcagttatggatagatgagagcagctactttcacagagaggtgctgttttgtcagtttgtccttttttttttttttttttgattgtgtctttctaagatacactaataaaggcaaagtaggtgttctcccagtgtcccttacaatattgaaagttgtttttgtgcagactagacatagaggtgccctcattcttggctttatctaattgcttaatcccaaaagctgttaatgtggtctgaattttttttctttttttctgagccaaagtatcttctaagtgcttagcaagctcttgtaatttagaaggaagggacaatctactgtcttatcttctgttttatgggaagttatgataccttcttcactgatctttagagtattctggaaggtggtagttaagtgatctctgaagccaggcatggatttattttttccttgtttacaggacttttttgtggtaaagtatacaccacataaaatttatcattttaaccattttttaagcacacaattcagtggcattgagtgcatttgcattgttgtacaatcattaccaccatccatctctagagctcttttatcttctcaagctcagactctgtttccattaagcactaactttccactccctgttatcttcaacccctggaaaccaccattctgtttttggtctctatgaatttgactactctaggtacctaatataattggaatcatacaatatttgtctttttgtgtctggcttatttcacttagtgcattttctttcttttttttttattatactttaagttttagggtacatgtgcacaacgtgcaggttagttacatatatatacatgtgccatgttggtatgttgcacccattaactcgtcatttaacattaggtatatctcctaatcctatccctcccccatctccccaccccacaacaggcccctgtgtgtaatgttccccttcctgtgtccatgtgttctcattgttcaattcccacctatgagtgacaacatacggtgtttggttctttgtccttgcgatagtttgccgagaatgacggtttccagcttcatccatgtccctacaaagaacatgaactcatcattttttatggctgcatagtattccatggtgtatatgtgccacattttcttaatcctgtctatcattgttggacatttgggttggttccaagtctttgctattgtgaatagtgccgcaataaacatacgtgtgcatgtgtctttatagcagcatgatttacaatcctttgagtatgtacccagtaatgggatggctgggtcaaatggtatttctagttcaagatccctgaggaatcgccacactgacttccacaatggttgaactagtttacagtcccactaacagtgtgaaagtgttcctatttctccacatcctctccagcacctgttgtttcctgactttttaatgatcgccattctaactggtgtgagatagtatctcattgtggttttgacttgcatttctctgatgcccagtgatgatgagcattttttcatgtatcttttgtctgcataaatgtcttcttttgagaagtgtctgttcatatccttcacccactttttgatggggttgtttgttttttcttgtaaatttgtttgagttcattgtagattctggatattagccctttgtcagatgagtagattgcaaaagttttctcccattctgtaggttgcctgttcactctgatggtagttttttttgctgtgcagaagctcttgagtttaattagatcccatttgtcaattttggcttttgttgccattgcttttggtgttttagacatgaagtccttgcccatgcctatgtcctgaatggtattgcctaggttttcttctagggtttttatggttttaggtctaacatttaagtctttgatccatcttgaattgatttttgtataaggtgtaaggaagggatccagtttcagctttctacatatggctagccagttttcccagcaccatttattaaatagggaatccttttcccatttcttgtttttgtcaggtttgtcaaagatcagatagttgtagatatgtggcattatttctgagggctctgttctgttcctttggtttatatctctgttttggtaccagtaccatgctgttttggttactgtagccttgtagtctagtttgaagtcaggtagcgtgatgcctccagcttttttcttttggcttaggattgacttggcagtgtgggctcttttttgggtccatatgaattttaaagtagttttttccaattctgtgaagaaagtcattggtagcttgatggggatggcattgaatctgtaaattaccttgggcggtatggccattttcgtgatattgattcttcctacccatgagcatggaatgttcttccatttgtttgtatcctcttttatttcattgagcagtgctttgtagttctccttgaagaggtccttcacatcccttgtaagttggattcctaggtattttattctctttgaagcaattgtgaatgggagttcactcatgatttggctctctacttgtctgttattggtgtataagaatgcttgtgatttttgcacattgatgttgtatcctgaggctttgctgaagttgcctatcagcttaaggagattttgggctgagatgatggggttttctagatatacaatcatgtcatctgcaaacagggacaatttgacttcctcttttcctaattgaataccttttatttccttctcctgcctggttgccctggccagaacttccaaccctatgttgaataggagtggtgagagagggcatccctgtcttgtgcccgttttcaaagggaatgcttccagtttttgcccattcagtatgatattggttgtgggtttgtcatagatagctcttattattttgagatacatcccatcaatacctaatttattgagagtttttagcatgaagcgttgttgaattttgtcaaaggccttttctgcatctattgacataatcatgtggtttttgtcgctggttctgtttatatgctggattatgtttattgatttgtgtatgttcccattcatgttgtcgtacgtgtcaggattttattcctttttaaggtcgaataatgtctcattgtatgtatataacacttttgtattcatttattcatcagcggacattggggttatttctgcctagtgactattatggttaaagctgccataaacattgatgtagaaatgtacaaatttctgttcaatctcctgttttcaattcttttgggtttatacccagaagtggaattgctggatcatatggtaattctatgtttaattttcatgttaagaactgccatactgttttgtggaacattttaacattttatattcccaacaacgcataagtgtgccaatttctccatattcttactgtttattattttatgttttttataactatcctaatgagtatcaagtggtatctcattgtggttttgatttgcatttccctacttattactaatattgagtatattttcatgtgtttattggctatttgtatgtcttctttggaaaaaagtgtctattaaagttatttgcccatttaaaaaataaggtctttgtttcatgtttttgagttatagaagttctttatacattctggatactacttccttatcagatatataattttaatatattttctcatgagttgccttttcactttgttgacagtgttctttgatgccaaaaagttattaatattaattatgatgaatccaattcatcttttttccttattgcttctgctttcagtgtcatagccaagaaatcattggcagacccaatgtcatgaaatttcccctttgctttcgtctaagaattgtaagttttagcttttacatctagatctttgatccattttgagttagttttggtatatggtataaagtaagggttcaatatcattctttggcatgtggatattcaacttttccaacattctttaaaaaaaaaaaaaggtcctttcctcattaaatggtcttggcacttttgttgaaaatcatttgcccatatatgcaagggttcatttttaggatctctgttctatcccattggtctatgtgtctgtctttgtaccagtaacacacttttgattactgtaactttgtagtaagttttgaaatcagaaagtgggagatctccaactttgttctttttcaatgttgttttgactatttgcagttttttgagattccatgtgaattttataatggcttcttctgcttctgcaaaaagcattgggattttgatagggattgaattgattctgtagatcacttgagcagtactggcaccttaacaacattaaggctcccagtccataaacatgggatgttcttccatttggttatcttctttaatttctttcaacaacattttgtagtatttcagtctttcgctttcttggtaagctcattcttaagtctttctttttttgatgttattgtaaatgaaattatcttattaattttattttcatgttgttcattcttagtgtatagaaacatacctagtttttctatgctgactttgtatcttgatactgtgctgaattgtttattagttgtaacaggttttttttttttttagaatctttatagttttctctatatgatatcatgttgtctgagaacacatagttttgcttcttccctttcaatttagatgccttttatttttttctcttgcctattgctctagccataatatccaatattatgtagaatacaagtggcaaagggtggcaaccttttcttgtttctgattttagaggaaaagttttccgtctttcactgttgagtatgacattaggtataggtttttctcatatactcttgattatgttgaagtagttttcatctattcctattttcttgagtggatttataatgaaagagattgaattttgtcaaatatttgttctacatcaactgagataatcatgtgtttcttttttttcccctttgttctattgatataatgtgttacattgattaaattttcatatattgacccatcctggtattccagggatatatcccgcttggtcatgttgcagaatcattttgatgtgcttttgaattcagtttgctagtattttgttgaagatttttgcatcaatattcatgagagctattgattttaacttttttcttgtggtttctttggtaagttgtatgtttctagtaatttgctcatttcatctagtgagatggatttttggccaataaatttggaaagaaaagatctcaaggatagctgctgagagttattgtcttattatttatactccttatatatctatgtttaattaaatattgtcccatatttttatatcattttggtaaacagtacatcttgcttttactaaacaaattttaggatatccagggctcaccaaaaggtgaactaattgagaagaagtccaggactataaatccctaaggcagtcctaaattcttcagtggatttgtgccatttcttaagaaagcttgacaagtcattaattggattatagaaatcttacctggaccatggttgaaggccataagacccatcagattggtcatcatactcacataccttataagatataatgaagagatgttgtccaggggaaaagatatgttcaagaaagaacggtagagaaaagggaagaaggtctgttgaaggtgtaggaagaagaggaggagcaggacaaaagagagaaggaagtcagggttccgaaggccacgagggaagacaaccacagtggggtcatgagatagagaagagaaatgaagcttggatttcagatccaccaagtttttattagttcttttgaaggtatccttaagggaagccatttacaaaatcttctgtcctttagagttgtctttataccaaacaaacaaacaagctaactcttggtatttagagtatttgagtcctttgattttaaggtaccaggcaaaagattatctaattctgttttttgttttttttgtttgtttgtttttgttttttagatatgcccaggctggagtgcagtgaaacaatcctggctcactgcgcactctgcctcccgcctcccgggttcaagcaattctcgtgcctcagcctctcgagtaggtgggactacaggcatgcaccaccaagcctggataatttttttatttttagtagagatggggtttcaccatgttggccaggctggtcttgaactcctggcctcaagttatccacccacctaggcctcccaaagtgttgggattacaggtgtaaagcaccacacctggtggattatcttattcttatcccaaatttcccagactgtcatgtgaagagaaatgtagtaaaattcagtgtgtgacatagcccagagaagtactagcacactgacttaaatacagtattttttacctcctctcatgtaattaaccttcccaatgggagtattttgtttggttgaacaaatatagtttggtcaaggaaattatagtcataagcaatataaatttatcaatagttggtttttgaatccactctacgttccaaaagaaaattacacagaacaaaaaagtattcctagatgtttttctataatgccacatagtccatgtcaccagacctgatggtgaggaaatagacaacatagacttacctgtaagttgccatgtgtgtatctgatctgacacacgtttatacacaaaaactttggagtcatttggaaattttgcaactccaatatgatattattctctttagtaattctgtcaatcagttgggatctgcaagatgattgtgataaaagttaattgttagtcatagcatatttttttaactgatgtaatgattattattgtcctaaattgacaggtgaagtatgctgtccagatgaacagcacaatcgggtttctgttggcattggtgattcctgctgtggcagaatgccgtactccacctcaggaaaccagatttgctgtgctgggaggcttcatgatggccatggccagaagtgctgtggcagacagattgtgagcaacgatttagagtgttgtggtggagaagaaggagtggtgtacaatcgccttccaggtaaggggcccaggtctacctttcagtagatggaggatctgagaagcagagagagtgagaaatttgccctagaaataaaacaaataagtaattaaagctcacattggttatatctaatgcaataattaggaacatattgtttaacacataacaatgtaatctcccaatttttacatgtatctcatgtatttcataaaaacgcatcaattttttttcctcttgaaaaggtcatgtcctccaaaaaaaattccacacatgaatgcattggttatgaatgaaaagaatatttcctagcaaatagtatacaaaattattataatgatattttgttataattcttttactcccttattctactgtattaagctaacactaatataaataacaataagtatcattgaatgaatactaacagacactgtgccaatattttatatattattacctcaaataatcttcacaataatcttacatgataggtactatcaattatctgcattttaaaaatgaagaaactgaagttcagacattagatattagacattatcttgctaaataccacacagtcagatccagattttgggaagcctgacatttatgttattggaggtggggcttttaaagacaagaaaattaaaatatgaagttaatgttcacagtatcttcaccaggcatagattccatctcaagaagccactttctttgctcctccctaagaagcaactcctcatctgttagttttatgattgcagcaattcagttacctcttcaggcttcacttctcattccagttctcttgctatttccactgcatctgcagttatttttcccattttgagtctaaaaccccttagtcatccatgagggttggaatcaacttcctctaaactcctgttaatgttgatattttgacttcttcccatgaatcatgaatattcttaattgcatctagaatggtgaatcctttccaggttttcaatttactttgtccagatccatcagaggaattactatctatggcagctatagccttacaaaatgtatttttaaataataaaactggaaagtcaaaatgactacttgacctatgctgtgttaataggcatgtaaacattaattttcttgtctatttccatcagagctcttgagtgaccagatgaattgtcagtgagtattaatattttaaaagaaatatcttttttctgagcagtaggtctcaataatgagcttaaaatacatagtaaaccatattgtaaacagatatgtaatcatacagcctttttgttccatttacaagcacaagcagaatagatttagcataattattaagggccctagagtttttgcagtggtcaatgagcatgggcttccacttaaagtcaccagctgctttagccccccagcaggagagtcaacctgtcctttgaaactttgaaaccaggcgttgactttttccctctacctatgaaagctctagttggcatcttcttccagtacaaggctatttcatctacaatgaagatctgttgtttagtgtagccaccttcatcagtgatcttacctaggtgttctgggtaacttgaggcagcagtttctacatcagcacttgctgcttcaccttgcacttttatgttatgaagatggctttttttcttaaacctcatgaaccaacttctgttagctttcatctattcttctgcagcttcctcatctctctcagccttcatagaattaaagagagtaagagccttgcctggactaggctttggcctaagggactattgtgactgatttgatcttctatccagaccactcaaagtgtcttcatatcagcaataaggctgtttcacttattcataagtgaatgataagtgaaatagaaatcttacctggaccacggttgaaggccataagacccacaagatttgtcatcattctcacataccttataagatataataaagagatactgtccaggggaaaagatatgttcaagaaggaatggtacagaaaagagaagaaggtctgttgaaggtgtgggaggaagaggagcattttgattttcttcaagaactgttcctttgcatgcataactgggctaactgttgggcatgagaggtctagtttttggcctgtcttggctttccacatgccttcctcaataagcttaatcattcctagcttttgatttaaagtgagagacatgagactcttcctttcacttgaacacttagaggctattgtaaggtaattaattggcctaattttaatattgctgtgcctcagagaataggaaggcctgaggagagggagaaagataaaggaacggctggtctgtgaaacagtcagaacacacaggacgctcatcaactaagctttccgtcttatatgggcaaggttcatgacacgctaaaacaattaccatagtaacatcaaaggtcattgaccacaaatataaatataaaatataaaaattaaaaatataaaaatataacaaatataataataatgaaaaagtttaaaatattgtgagaatcatcaaaatgtgacagagacacgaagcgaacacgtgctattggaaaattggcaccaatagacttcttgatgcagggtggccacaaaacttcaatttgtaaaaaaatgcagtctctgcaaagtgcagtaaatcaaagcacaataacgtgaagtaagcctgtgatactaaactactatatgcctttttaactcttattctctcctatgtgtacagcagagcttttcagatgttacatggcatgatttgcaacagatcgaatgcagactcagaaagaaaattaaattgacttctcttaactaaacatttaaaaagcttgcaaaaatataacacaatgtcattcttctattttttatttgaaaaacatttattttcataaatatgttagaatgttatagatttattattttatgtctaaatgcattaataaatatttcaaaaatttctgccgtaagttttaacacagtacatatcaacaggtaaaacccatataaacaaaaggtatttggggtcctcaataattcgtaagcgtataaaaggatcctgagaccataatttgagaaccactgcttaaagtcatagtaacgtctactagaaaattatggcaactaattagttatcctgtactatgactaaccagttgaatacctcctcctcctttagatgaagtagctaataacaggtctattaaagatagaaccaaggtggcagggagggtgcaaaagtgttacctcctgtgtactctaatacatcagagtttaaaaatgacagcaaaatatttgattttagtgtgtttgttcatctgtagctttttaaaagaattagtcaactgctatactccgtcctttgttaaatatgtattatgtagtaaccatattcaagacatcattcttggtgctttgcaagtgtaaaaatggccaagattccgtttttatcctcaagaacttacaacctaatcaaggagaaaagtgcctacaaggttatacacagaccataagagagggatgaatgcatgcatattcttaagacggagagatcactccagtcaaggtaatgaagggggttgttccattggattggaatctcaaacagtgagtatgattttggcaggtgtggcttgagctaaactgtgaaattagcaatctgcaaaacacaaataatagcgtgtgctttggtttacaggaggtatacactctgtgtaaggaagaaaggagataaatctgagtaggcaaaaggatttgaacattatttagcactcagggaagagtcaatatgatgataagaactgtagtttaagattaaatttaggtgtcagaacaaatacaatagagaaggaaagagaagtcagaacacccctggcatgaagtaaaatacatctgttctaagaagtggaatggaggttaccgtccactaggacaatggttcttaacttgttttccttttgaatcttttggaagttacaaaccctcactctgaataatagtgcatggaatatacacaaaaatttgcctgtaattttatccacccttgaactccatccatgaactcaaatttcagaatcacttctttatttactccaagatgatgtcgcatgccagtcaaacatttcttacacaaatggtgacagccctcaactcttgcgaatcaagataagctctagagtttctcatggcattctacagctctgccaactctgataatcatagtggacttaaggaataatagttttacaaaggaaaaaatatatctttttattctcttgactttctttctgcaggttgcactgaaaatagacagattccacatgtatttttcctctctctgctgccgttcactcctgtagcccctaatgactgtgaccttaatgaccttccagaatatccatatggccctttttctcctcaacctagcaacaaacagcatacctgctacataagtgtttggatctcataatatcgttcctaagcctggcctctctcgctgcctggcattgtgtgcctgccacgagaccgggctggctcgtaaaacatctctttatgtactttattacttaaactcttttatttgcctgcaggagccctttaacaaaatcacattgaattgactttctcacaccaaatcaaatctccctggtcccagttcagttgtctttgtcaatatgtattttataaatggagtgaattaacagatgctgttggaacagaagtgctggggtggcgtttatgtttttagtgctctctctgggcagatgcgttgtgtagaagtgttatacaggtatctcgggatgaaagtcatgcgtgtcatttcagtggatatgtattcttagccattttctttgaatagattttaaacctatttattactcatttttttcttagtgtttgcttatatagctttatcatttatgccattaatcttggattggacttgattatatcccttagtatgaaaaggtgaaaaattaaaacctccgtttcattcaaagaggacagatttttctattagccatgggaaactgatcatgagatgactttggaatatattgacttatttatattataaactttgtccatgcggcctttgatgtgaaactctgagttgaaattgtttcagaatacaagactgagttttcatgtcctggactctgacttcagtagaacaaatgactatcgctgtttgtttcataagatgggaatttgggaattttgcagagggaagtataattacagaagtccatggtgtaagggtggcattgaaaaaacatttccctggaagatttccataaaacagaatgattttttttttgaaaagtgtaatatatcagtgctataaaatgtatcacaatgatttggggagcatttttactctaccctctgttttgtggtggtagtcacagagccatctactggtgaagacaagtgtgaatttcttttctttcatgctctgccacaaatgttatacatttgtcctaaggatgactaatcacaaaccttttttttcttctaggcctaaaatatcccttggcttaaaatttggtccccatgaacaatctcagagtttcacaatgatttgtcatattccagactggattttactactatactatttttatctcaaaggcatgatacataattcttggtcttctttaaaaaaaagtggaatcccagttttgcagtcttaactatttagaaattcatccaacagatatgcttataaatgcttttctttttagacatagatatgaaataagcattggtaacatatttgaagtattaataatattgtgagtaaaaattttttcctccactattttctcagttgtgtccaatcaatggaaaccattggatatatatacagtttagaaagacaatatatgctttttcatctgaaaaataaacacctactagtttaatgtgtactgtaccactttactaacatctgcattttgttcaaagacacactccaccttttgtacaaatttaatgaagaggctctggaagaatggaccaatccatcaataatgcatgacctattttgtttttctttgggcatatttaaaatcgtgcattccgtgtgtcaaagttcaaaagtcaagtgctacatgtgataaattaggtaggggtcgaaagttattgcaatgcagtttcggaagattgtctgtctctgaatttgcagctcattcatgctgaagtgatgcactatgggaattactaccaaactctgctccgcaacatctgctctccctaagtgagttagtgcacgtcagacatctttatgtcagaatattgcagtgatggatgcagtcttcagaaaatgctgcataaaaatctggtgtgccgttctggccattaagtgaaattactatttaaattaatggcactgtcacagtttatctgtgcaaagaatgaacgctgattagggtattaagtaattagcaatttatcacactggaacaaggttgataataattaaagaagtaatggtttaccaaagaatctaaaaagggagtcacttcttgttatgtgagtgaaatcttggctgaaaatttcaattcagtaatacaaagatgaagctctttgtgaaagaaggcatcttttttttctagtttaaaaacagttcattatcaaaattttagttgacctgtcagaagtccctcagagtgatcagatgactgattaggagtttcaaattaggtcaatgtctgcatttttattttatacttaaagcatagtgaaaccatgaagtaatttgggaatgagagggggagaatatattccgctccctaaagggccagttttcaaattttgattgctctttaaaagagaaacatgaattgtcttcagaaaactgccagagaaaaaattaacagtaaaaaaatccatggttgtatttaaatgtctaatcagaaggggcagaaaaatgcccgaacaatataaaacttgaagctacggatttttctttttagtttatgtgtgtgtgtacactcatgtatgtatatatttatatgtatttgtgtgtgtatatatacacatacatatgcatacatacatagctacacacacataaatatgtgtatttgggtatgtacttatacatacacacatatatacccaccataatccagactcagactaaaatgagccctgctctttgtattaatttgagataacttttcctagaaatgttaaaaccactaaaattataaatatagcagttaatttgtaaaccaattacttcgaagagttatcacattagataaacatggtatgccaaagctctgttagaatcagtgtatatcattaatcataaataagagtttttaatattagagacttttgtaagtaaaaagatgaatgagagggttctttggagtcatgtgtggataaacatctttcttaaggcatgtgccaaaccaatgtctactttcaatgattttttttaaaagcacttttgatcttttatttgagtgtctttaataatgtagatgtttacacaggaccagattaaacaattcaggaccccagggcactttgaatttgaggttctttatgttatcagtcggaactaataataaacaaacaaaattccaattaaaataaatcattcatcacattgtgctgctatataactggatataaattctaatataaaaacactgtgacatgcagtatagccaccttgatttctagcttgatctgtctctagagtagtgttaatttattcctgctttaatgttaaaatttctgccatttctctttgatggcaatatctaaatgatgcaaatgcaggtaattaaactaaatttggtgggagaaaatgtctatttggtatctcaggtacgtgtgtctttcgtttagatgtggggatcagtgatcctctctacaaggtctttctgcggctgcccccagcctgtcacctgtgtctgtgatgggtctagaacagagtgaggctcaaaaaatagtggctgattagtgcacctgatcagtgaacatgctcagctgattatgaataaataccaaatccatctcatgcagaaaacatggttaccattgcagctaaattcacaagaaacaaatatttgtaccctaaataaagctaagccaaaacttgcactgcttctcccgcagggcttccagttctaggatggtgctacctttccactctgcctgggcttttatcccagagtacttgggtgaccttttctcccttatgaatttctagagctttctcagagtccctatagtttaactaaccttcttctgcaacaagatgttatcatcacaaaatgcgcaggcagttttcatgacagaaatcctatctctttttatggagcatgagagaagtttggcccagctgaatgattttcgaacatttcctcttgtgtgttcttttcctaattagtgtctagtgctcttggtaagaaggaccctcactgcacatttaaatcaccttggtagggaaatgctaccttaggtattgcaccatttcagcaactgcctgagcctgacatttttataccaaactttatagcagcctcagttttcttccctttttctatttcatattcatatataacattttattgttgcaggtatgttctgttgtgggcaggattatgtgaatatgtcagataccatatgctgctcagcttccagtggagagtctaaagcacatattaaaaagaatgacccggtgccagtaaaatgctgtgagactgaacttattccaaagagccagaaatgctgtaatggagttggatataatcctttgaaatatgtttgctctgacaagatttcaactggaatgatgatgaaggtaattgatagaaaagctctcggaggcgctgatttgacaatggaaagagaaatacattgttcataactatttttctaaaataggaatataaaaactcctgtgtgcattattcattttcacattacatccatattaataccgaatgagttcgctatgattgatgttattgcaatgaattctaaaggaattaataatgattagctgttctcagggaagctttacccagcacttcagattagtgcaggactgaaagtctgtgtgccactgaaagagccagcacaggtcgtctggggcctctgcatggtgccatttcatgcctgggagcactgtggatggaggcaggaggaaattcccgcttcttctccctagcccgccagccatcatccaccactttcctttgatagagaccttagatccagcaaattcgcttagttgcatttatatcatattcccttggacaatgcaagatgagcaaatgcctgtgtcaaaagtgaatgaataggcttctgggtgtaatcgcttatgtttttgtatggtgatggtttgtacacagccatgtcatgtatgtgggtattaaacttgacccaggataccagaagcctatcaatttaaggaaaggaccatggacactttaaaaataaacatgctaccgtgttctgtagtaatttgtcattataagaccactaaaaatgggtgtcttggtcacagacaatggaaggacgcttgttcaatgaggcaactacacagtccttgtgtagaccacatacactttgtacactttgggatgtaaaataactcatgagattgttagaagccctgcaagcactttgtatcaatgaatgattaagataacacataaggttggttaaattattctaatgaggacaatatttctccatgctgaatcaagtagtgtgtatacataataatgttcagtctgtaggtttcattttgttttctgaagacctaccacctggagacatttatatcctgttccagtctggaatggatcaccatgggatttttacatagctggcccattcggtcttccctaagctatcaattcaggaattccttttacctctttcctgtgttgattcccctgtttttttgttttgttttgttttgttttgttttgttttggattccaagtttcattccatttggagaattatcttcttgtatatagatgtatggagggtaaattttttaaaagcttaatgtataaaaatactattattttaccctccaacaggattgatagtttggtctgatatacaattccaggttaaaaattatgtctactcagaattttgaggcatttctgcatgttttaagcttccattaatattttgattcctatctctctgttggtaaccatgtttcttttcctatgaaagctcttgaagatgttctctttatcctgctcctctaaaatttcatgacaatgaacctctatgtggaagttaggatggtttctttttgcattttgttttccatttttgtgatgagagcatttaggatctactctcttagcaattttttttttacattacaattcattatgagttaggcagttgtcttccaagtaacatctctagaaccgaagccccttacatcttgtgatgcttcatgcagcccttggatcataatggaaaaggcgcaagaggggacaattgcacacagacagttcctacctggatatagagtacatcctttctatgcactagtcacacagacatatctagtcaggtggcttctcctactgcagccaggtttcaacatcccatgttcccagagagaaaagggaaacatggacatcactgagcacattgcattgtctctgccacattcatctactttccagcttccaaaaaggtatgcactgtcttgtgtgtattatttttctccattttttcttagactttcaacacgtaaaccagtattttactgtcatttagttgggcttttagaggatagatagatagatatagatagatagatacacacacatacacacacacacatatatatatagtgggattctatttatgtagtgtcatcttggctcactgcaacctctacctgctaggttcaagcgattctcctccctcaacctgccaagtagctgggattacaggtgtgcgccaccaagcccagctaatttttgtttttttagtagtgacagggtttcgccatgttgatcggtctggtctcgaaatcctgacctcaagtgatccacccacctccgcctcccaaagtgttgggattatagacatgagccactgcgcccagacccactatatatttttgaatgtactattttgatcaacttggtaagaataattcaacttattttatgtaagagagaggctgaatggagatcaattttaatagcaaaaagtattctaaatacattatgctacttatgtaaaggaaaggcaaagtagatctccacattataaaactattaccttacttatagctcttgtagtgtgggatgattaagtatttaatttccttggattaaaacaaagtggtacttatcaaaaaccataaaaaatctggagatgtgtcagagaaaatgtttataagcgtaaataattataattacaatgacagttcatgaaacatttatatttttaaaaacttggatcagtaatacttctaatgggaccaacttccccaacaacacaggaagtgtaaattctcaaatatcacattctttattttctctaaaattccataggaaagtatcaaatagcaaaaataaaatatttgtagtgtgtatactaagtttaaagacttatcagttttgagtcacacaacaaaccttggtggtaaattatatgatttgagtcacacaacaaaccttggtagtaaattttgtctccatgttccccactgaagaagctgaggttttgaaaacataagtgacttgctcaaggttacagagctgggaagctgcaaaactgaaattttaatcccaatttgtgacatttcaaagtcattgttcttcctagtatacaaactgccttcatttctttttataaattttgaaatattcattcatcaagtaagtggaggaaaaatttcatttgaaagtcacaaaagcctaccctatgtatgtctaaatgaaatttttaaatacccctctctctctcacccctgccacttgactcaggaaaccaaagagtgcaggatcctctgcccagcatctatggaagccacagaacattgtggcaggtgtgacttcaactttaccagccacatttgcactgtgataagagggtctcacaattccacagggaaggcatcaattgaagaaatgtgttcatctgccgaagaaaccattcatacagggagtgtaaacacgtactcttacacaggtaacagaaagcaagctgtctgcccatggcttaatggggttagtgagaagctgctgaaaatgcagatttatttcactctgacatcaactctccttaaactgatatcagtacattccatcatactttgaggccagctagttacaaggtaattaaaggcataatctggatgtattcaaagtcagtactttaaaatgtgttaaagtctatttaaacaaggttgtattccatattaaggtaaatctgtggagatatctgtgacctttactgctatatccagttaatttacaataaatccaatttcctttttcaaaagctgcaatgcagcttccactgaatgcattgaatgaatactgctatactcttaagcagaaagaaggatgaacctgtctgattaataataaaacctaacagtgctactctgaggatgaggtaaacccaagcatgacatttctccaagatggctggtcatctccaaaagaataacctttgcagttattgtaaatattaatttctatgtaccatcttggccctgctgaattagtccaaaatggttatgcttagttttggctgagctgtgtgagaaacactgttaagtttagaattatctctaaaacagttctgccatcaattaaatttgtgttattcatccatttacttaagtccctacaaaatgtgttcttgttttttgaaaaatcaagtttgtgtgtgtgtgtgtgtgtgtgtgtgtgtgtgtgtgtatcatctatcatcttgattcaatagaatccatttaagtgacataatttgagcaagctaaggttaataaacaagcaaaacattgctccattccatcatgaatcatcagtctgctttactcaaccaaggggcaataatggctaacctcaagagtgcagaaagtaaggcaggctactaagataagaggaggaagattaggaagggaagaaaggaacagagataaggttgattgaacattatttagtctcaatgttatactaggtactttaatttttttattatactttaagttctagggtacatgtgcacaacgtgcaggtttgttacatgtatacatgtgccatgttggtgtgctgcacccattaacttgtcatttacattaggtatatctctacactaggtactttaaaaccttatctcagttaccaacaaagcaatcatataaatatggtcatttaacagatgaggaaactgagggtcagatctgtaaaagttactcgccatgagaaagaaacatattcaaataatgccatcatcaaaagggacagactttgaagactccacgtggtgcaggagctcctttcagagtgctccaaatgcacttcaagctgttattccacctgaaatgtcctcctttatcatcctactcaaggcctaggtcaagattcttttcctcaatgcagtccctgtgctgctatggcacattgttcacaaagctcactagctctctcatgtgtcatatggatttggacacttgttccagctcttctattagattgaaacatccttatgaatagggcatttttgtttacctttgcctcgttatttggatttagaacactatacaaacaaaaaatatttcttggaatgaatttaattaggaaaggcctcagatagaggacaatttgtccaaccttctattgtgttcccagtcccagttatagatttaagtcatggactttcatttttaaattattgagtttccatctaagagagttctctacttttatctgccccttgtaatcaagatcaagattttgaagggcttttaataaatacttgtaatagccctctccagaagtgaatagatgtttccacctactgatataatgttatgagggcttttaaaatccatatttcagattgctttgcctgcagaaaatactacaaattgaatatgaaaaataacaaactgttctttttcatgaaagatgttcagcacacaagtggtgctatgataattccattgagaacaatttagattaagtcagactcttttagaaacttacacttgaaagctgacaataccagtgctgacaaaaatttattcatttatgcaatcatttatttatcaaaaattatttattaaatacctactaataactagtcactacattaggactagcagctatgatgacaaacaataatttttcattgagatttcaaccctatatgaagaaagaaggaagcagcaaatgagatttgaaatggtaatgtgggcttgaggatacagaataacagtcattaccaataagtagtttaatttgctgtagcagaaatgtaaaacatattgaccatctgagggtaggtagatggtctaggcaactgaatcgcacaaggtcattcaggtatccagaatccagaatggcaaccgaaggtatgcaattttctctttataaaatgatgtggaagttgtcagtgtctttctatactccttcaagtattgagatctgagtcatgtgaccactagaagctacaaagaaaactggcaaatgtggttttctaagcaggaggcctctgaccaggatggaagggagaactggggactcatggttgccatcacaggcaacaagtggcagatacccccgagcagaaaaaaatggaaaaggaagataatgctttacatttgtagagcaatctgcattttatgaagttctgccccataatttattgcattgtattttcatattagttctatacagtgggcagggaagggtttattgtaaggagatgtatataaggagaatgtctctccattaatctaagcatagagactgagaattaactccacgtccaatggagatgagcaggtggccaggcagccaaggaggaaggcctccttttctgatgctcaatctgagaaagagtcatccagaagctaacacacaaaaatacatacatacttacttaaaattcatcaaattagagacatggaaaataaatttaaataattaaactttcaagtaagtttttcaggggaaatgtgtagcattggtatttccgaagttattaaagcctaaatggaactaagactttggggacacaactgaatcacatgagtgttcatctaatacaatttttgccagtttggaaagctcagcaggcttggttttattgttttaataaagttggttggtttgtattttggttttcagttctggcttttgtggaagagggaaggaactagatagcagagtatgctttcatttttattcactaacatggtaccatgataaactaagtttcaaatcctgtatattgtaacaacattataatccatatgatttaaaattttttaagtaatattaacaaagtaacagaaagcaataatttataagttctatgatactaaaactataaaagaatgttgccaaacctgtctcatgtaggaatcaaaactacatgaatttgtgaagcactaaatcttattatacatgattccagtgcttttatttttcatttatttaatatatccctctttctctgctcagaaacagggaattctattctgtgcaattccgtatccctgcatctaataaatactttaaatgttacttatatttagaaaataaagatattagagttttatttatatacaaagcgtttagagcattaaacatttatttttaaatgtctaaagtttttgatattcacttttaatatgatggttaaaaaatgaaaataagagaaacttccctgtctattttttctctttccagatgtgaacctcaagccctacatgacatatgagtacaggatttctgcctggaacagctatgggcgaggactcagcaaagctgtgagagccagaacaaaagaagatgtgcctcaaggagtgagtccccctacgtggaccaaaatagacaatcttgaagatacaattgtcttaaactggagaaaacctatacaatcaaatggtattgagatacctttaaaatacaaataacaaaatcccataaattcataagaaaattgaaatgagtacaatctacatttaattgccctatgcatctaaccactagaaaagtatgttccgataaagggaactgtaattatgtgacaactaatcactcactttgtggtgtagtcctcgtagatttttagcctaaataagtaaaaaaatagaaatgaaagttccttgaatcccagaatatatctgagctgctttcaaaacaagcaaggcatattcagagaaggggaaagagttttaatattgaaagtaaatttgtttcatagtgaaaggaaataaacataaatgactcttatcatttatgtcaagaatccatctcctccataatagtataattaggaactgcttgagacagcaatataataggaaattaaaattaaataaagctatagtattgcatttcttccgaacactaagatttgtaagttgtttgcaaatagttaaaatgatatcacattcaaatgcagtcatttttctgcttcttttaggtcctattatttactacatccttcttcgaaatggaattgaacgttttcggggaacatcactgagcttctctgataaagagggaattcaaccatttcaggaatattcatatcagctgaaagcttgcacggttgctggctgtgccaccagtagcaaggtaagaggagtttgcctaaactctgggaaaaggggttcagtgtgaagattatctgaacatccaggttgtgactgcttttttcattgaagaaaacaatgtccctcctcaaagtggtgttaagtagcgtgttcatgtgtcacgttaactgagtgctaatacctatggctggaaggagagatcatttcaagggagatttatccaaatatcaatcttgtgttaatgaaaaacaagtgaaatcttgaagcagtaccatcttttcttccacattctttcctcaccaaccaattttaggtaatctataaatctataaaaatgtccaaatcattattcagttaaagaaagtttctatttaaatatgatatgaacaaaaattgtctgattttaaaaaatgaagagaagggcaaaaaagcctggcacggaaaacaaaattgttccaagccttctgctatagccttgtcaagaaataatgaagacctgaatttaggcagcagaggtcagaaccgagaatacagaatgatacaacagacatgggggataaaatctacaaaacttggtactcaattatatttacagaaataaaaggaaagagtcacggatattgtcaaatatctgcttgagtaatttgtggatcatggtgctattctgcaagcaaatttttaaaaaagagaaaaatgttgaaggtaaaagaataggattctgttttgttaagttttgtaaaaaatatatttaaagagaaggatcagatagcagggtggcggaagcagatagtacttggcactttatgtgaaaatatctggtcagaaaccagattgagaggtgactgaagtttctagaaagatctgtatgggaagttgaagtaatgagtataaatatggacatggaaggagaatagagagaaacaaatatggaatattgtggatgatgagcactggggaatgctaccaaatgaaaaagaaagaaaagcccacaaagaagactggaaataaacaatcaaacaatgtgggagtaaaataaagaaagggacatttcatagaagccagccttgacagaggaagcccaggaggaaacaaacttacacagagtagctctgattcttttcatatgcttaaaactttagaagagcaacatctttgcacactgtgcaagagccatccaaatgaaacattcagccacactgctcagccacagtgcaagaatgcaacattttgttcaacagacttctggaaacctttctgagtgagccaccatttagatagatagatggcagctgattggcccagtcaaaagttattagtcctagaacaattccatgctttttgcataggcacacttcatgcctgctacatgcaaagcaattgtttacaaagtgaaaaaagttaattctatgaaagaagccaatttttgtccaaaactatgttttgacaatattgactaagtaattgatttatttttttcttctgacttgtttctttctttagaaagttggtgcagacactataaagtcatcctaggtatcatgggaagagtaccgaaatgtctgcccatttattctgttcaaagcatattgtatgcaagcaagttcagatgtggcttttgctccatatttactggtgcttaaaatgtatgaaatcaggctgttaaaatgcaaagacactgatgggccatatggaagagagttatcaagagttctctagtaagacagtctgccagccagattttacttgtttaaacactgagggctgcactctgccgtcaaaattgttgttgaacctgttgtgataaatggtagtgtgagacttatgtaatatattcaaggtcagatttcattgtttaaataggttgggagggaaaaaaatgaaaaaaaagggaaatgcttctccaagcccctgctaatgatatgccaggccagacaacattttaaaacaaaagtgacattctcattgatcaggatagctagtgcactattacaataaattgctgcttaattcctacgtcttcaggtagttgcagctactacccaaggagttccggagagcatcctgccaccaagcatcacagccctaagtgcagtggctctgcatctgagctggagtgtccctgagaaatcaaacggcgtcattaaagagtaccagatcaggcaggttgggaaaggtctcatccacactgacaccactgacaggagacagcatacggtcacaggtgagaaaacaaaaaaaaaggaaatcctactggaggagtctgtcattgtggttaggggggcaaagcatcccaggggtgtgtgtttgatatatgaggtcacttcgaaaggacgtgttctcttgacatatggtcaggtcccacttatccatgctaatagaagagcccacactggcagcaatacgccacaacagcagataacttcagaaataatttatatttggccttgatatgcattatgtgaagggtttttgcatcagtattaactttttttttcaaacaaacagtaagatgcattttcattccccaaggatatactcatagttaatgggactaagatagccaagaatatactggaaggcaggggaaaatcagccagaggttaacatttgtctatcaagtggataattaatacacaggactagttgacagtggagtcattgtgactgtttgttactattaggaatgttaattaatagcaattgtgtttttttaatttattataatgtttattatcattagccttaataatatactattagtacagtacaatgatatgttagataattgctagtagtgattatgataataattaacaggttttagcttaaatgccacttctgaagggaggagaagcattttctgacttacttgctcgaataggttctctaacacaccaccacatcactttgttttatttccatcatagacctctcactgcctgatattttagtgtttgttttttgtctttttatgtctctccacacttgaatgtaggctccaagagagcaggaaccttatctacttgttcagtgttgtacctctagcacttatagtcctgaacacattaataggagctaaataaacgtttggggaagaagggaacttaatatgtgccagacgctgtcctaagcactttgagtgcactatgcaatttgattctccatcaccaacctaagatgtacagtgaattactaccttcattttacagaaaagaatactttgagaagttaagtaatttagttcattattcgagtctactgaatcatcccaaacaaccctgttaagtttaaattctaagaccatgggcaagattgtataaactttcccttttttcccattgtcagccacctccttccaagacttcctgagtggatgacctccttccattggactgcactttttgcagggggtgttgatagcacagataatgaaactcacagaaaagtgcagaaaggccttggaaaaatgtgactgatttttcctaagaagggacacaggttacacttacacagggtggcaaaataaattcatcacttttcactcttaaatgccacaattccctaacacataagcaagcattcattgacaaaatctccagtatttttccaaaagggccgtaaacctgcagaaggtgcttaatacaactcttggcctggcacattgtattccttacctcaagatcctgggctaaatcaatgatgatagtgttgaggctgggtgcggtggctcatgcctgtaatctcagcactttgggacgccgaggcagccggatcacctgaggtcaggagttcgagaccagcctggccaacatggcaaaacctcgtctctactaaaaatacaaaaatcagttgggcatggtggtgtgcatctgtaatcccagctactctggaggctgaggtaggggaatcactccaacctgggcggcagaggttgcagtgagctgagattacaccagtgcactccagcctgggcaacagaacgagactctgtctcaaaaaaaaaaaaaagataatggggttgggagaagccctcatatttgaatgatcaaaattatttcttttatcttattttacttgaagtggaaatcatcacaagtgattgaaataatggtgttttacataataaaaccttacttctatgtggtgctttatcatttaaagaaacgtttgcattttgacttctctgactctcatcacatccttgtaagagatgtttttaataatcatatctgaaagatgaagaagaaagccaacctactcagcgtatccaaggcattcactgcctgtatctgaaaggaaatcagaatatcatttcgttctcccaaaaatgaattgccagcttgcagttttccagatagtacactaagtggtctaaaataagactgctgctcttaagatcctctcacgtacagggaagactgacaagaaaagaaataactgaaaacagagctctatacaggatgcagtggtgaaaaatcaaatgagtcacttggagtaagcaatgggatgttaattacagggttttgaaaagcaagtttaggcacattaagactgtaccagcaaaggtttcacaataattgtgatataaggctaaagaaatttcttcttgtagtatctatcaacttaaccagcatcagcttcgaattgttgctactttattggtttgcattttttagaaatcagcatttatacaccaacagaccaaattcaattgtaatgttcaaaccaacaggattgatagcctcattaattataaaataattgcaaagatttttctctaaataacttcaccctaccagttcttcctttcattgacatttttaatggctatttttatgtcagagtagatttcatacatgtatcttggtgccagaaatcctattattagcataaatattttaaggttttttaatataattttaatttttacttaacagtaaaaaatcataatctggtaaaagcctttaggagtcctttgaccaatctccctgttctacttttgatttgttttaatttctatggatattgttttaaatagatttagagagtatttcacttgcccaatacagccctaaagaggggtttctttgtagaataaagaaataagtcctcattcagcaaaaccttaccaagtacagagcctcctatatgtagttctttggggacaggaatggtgctaggcattagataatcggaaacttgagatctatataatgttactcatttgcccaggaaaattcagttccacggttagctgactgaccaaatgtagtactgaagtattttatggtgtgaatgactgttttattgagttcatggaatgaactaaaataatcaaatttattttctgttccatcttaaatgtttgatggaaatgctgcctgaaccccctaggataaatgttttgattttctcatcatttccaaaagcttggcattccctaagcaacacagcactaataaagctgtagcactagtcgtcctggagcctgaaaatctaggtccttaggaatgacaggagggaaagggagcaccttgcctcggccccattgtctccatgcttatttttaattacctcaaagctttagaaacatgatcccgtaaatgctttgtgggaatagtggcgaatgcactcatcatgtgaaatccataaattgcttataatcctctcaagatgttaaaaaaagcattaagtaattgaagacaggaagtcctcggttaattatttagaggtgttatcaatgctttaagtaaactgaagcgttttctgctatctcactgagctgaataccatggggacgaaggagtagcagccatcatcttctcatattcgctaatgcaaacagcgcatggcagcttgtcaataaaagaccttttcatatcatttattactaaacacatccaccatcctgtacagaacaatttggacatcagttatggcattgtttcactttgggctacctctacattatacgtaggcctcctaatgtgagtttaggaatagaagaaaggattaactaaataattaaggccactgagaaaaaaatgaattagtcatgtcctgtttagcataacgtataataagggcctatgtgtctcttactctggaaaactattttcaaaataattaattagaaattactcatcattgcatttcatttaaaaggaaaaactcaccagcattaaattagcaaggaaagaataatttactttcgtttctcatcttcctagaagttaatgaaaactttgtgtgctaaatagaacaaaccctaacaatgctggttgtagcagaaaatgtaatactaatgttatactgaaacagataccttacacttcaccttggaaaaagagaaaacatactttaaccaccaatacaacaaaatgtagaaattctttgtaagggattttatttttagataactctgctatgtgttcccatattatctttgctctcgtagtaattatcacattttattctaatagcctttcctcttgtctctgttccacacttagtaataggtaatgctttttaagtacagagacagtagcttcctgtttgccattgtgttcctggtacctatcacagtacttaatatattcaaaaaatgtttgtcgaatgaataaatactgaatagtaaactagtatttgactacattctgttttgaatggagataaaaatgccactgtcaaacgtatctaaatcgcagacagatctggcaacaaaattgtggggtccagtgcgaaatgaaaattcaggccccttgttcagaaatcattaaaatttcaagacaatggaagcagagcatagaagtaagctcatgtgcttccaagcatggtaccgtgtttgattgcacagtcgaagcccacaaagccaaccctgatctccagcagtctggaattagctgcagtatatttctttaattaaaacagatagcaagaaaactaggatggtgataatgtcctcaaaaagctttgggagtttcttctatggttgtttgcaatgctccaggctgcattccccccagttactatgtaattactgaccaccaagcactggggacctgtgaaaatagagataagaatttgttttcttttcattttttcaactctgagaacaactaaatttgtgcctgaccaaaaaagtaaaaaaaaaaaagaaaaaaaaaagtgtggcatcaaccacttttttgtgttttaaaacctgcctattgataaaatattaaggccaaagaactataattgatagctgcctagacaatgatattttttaaaattccccttaaatcccagatattccaatgtactttgccagatactagttctgttttgtcactccagttctggccacccccttccctctgcaatgtcctcattgtctcacgtttgagcaacatcagattttgctgccacctgacatcacattttgtttttagagaagaaaagtctgcctggaaatgcagagaagaatcctcagtctagcataacactgaacttgaaagaggaaaagtatttattaaaatatttattaaaatactgtcactaaaatcaaaatatatatatcacagatataattcatattatatttttgttgttatatttattccagatatacatcaacattaagactattatttagacaccaccaaagaaaaagggtctttccttggtggtgtctaaataatagtcttaatgctgatgtatatctaaagagagtctgccaaagaagtaacttgtttaggaaaggcgtcttgggatcaggaagatattggagagaggggcctaagctatggcccagaatttcaaatgaaatatagaattaataacgcaagttagcttatagcaagtagtcagaactaaaagtcatgaagtgatcttactggcatgtgcaatgcaagagtccctttgttttgatgttttgatgttcagttcatatgaggtagcaactgaattcataaagcatgaatacagaaaatggacagtacaaatgctgctcaatgggggggaggaaattggcttgggtaagtggaatgggcagctgttgagattgtgaagaatgataccatccagaaaagatggctttagcatgtgaactcccgaaataatccttaatcaaatcctgtaaaacaaattctaatttaaaggtaccttagatgtctgtaaagtaattccatgatgcctttgtataccagttttgaacatctggattttcacagattgtcagattgatctaagtagaatgctgatatggctctatccatcacagtcaagatcaccaggggatgctggaagttcctgggaatctcagtaggcagagatgctccgaaagggatcacttagtgagatcccaggcaagtgagggcaaaaggaagcaacatcattatagttgtctgggtatatactctggggctcgttgtcttgcgccaagaaagaattcaggacacagacacatgtgggtgtgttaaggagtggaaagtttaatagaagaaaggagagaggagagcagctccttgtgagagagagagagaaagacagagagagagagagagagagacagagagagagagagagagacagagagacagagagacatccgtaaagtggggaggcagcggaccaaagcagattttacaggcaggctggagaaggcagtgtctgatttatatagggctcacagattggttcgatcaagtatgacatttacatagtgggaggggaaggctggtcaccccaccctaatcttattatgcaaatgggccttccagttgattggttccatcttgtctgagccttacagtacaagtggctgacaaggagaagggaagatggagcctccatcttgaacatgtacagtccttagttcctgcccacattcacccatgcaagcacccagcttgtttacctatgtctgcagctcgattttacatgcttgccctttgttagaaaattatttggggctttttactaaaaagaaaaggcttaccgaggactcccatacctttactatctgcctaagtgatttcttcttaactcctgtatcattagcaaggactgaatgtgagcagccgaggggccagaccacacatccagtttgggtgaactggtgccaggacagatgacttacccgcaggatggttattcacaatactttataagcaccaaacaaaaactttttaacgtaactcaggcctctcagtgcttgagctaatcactaaacatgctgatggaggaactcactgaattacacatcctttaggactatttggtaattctttagaacatagcagatgacactatagaataattggctgaatgttttgaagtagcacttgctatgtgaaattataatggctaaagtgcctttttttgactatttatcaagagattaaaaattggaagcaagctgttctttatagagtacatcaaatgttaactttcatagacatgggttttgttttccaaatcatatttttatgaactaaaggcagactttttgcagtcccttttagcacacatttactcttcaaagtaatgttacttggaagtgtaattgtaatgagtttggttatattatgcttctttcctttaaaaaagaacatgattccctgtagggaaattcaggtaatttgcagccacagtaatcttcactatactgaaatgttaaatacttggcttttctccatgtgtttgcctttctgtactctacaagtgctatttcctactcttctaattcaatgctgagcacttgaatgatgttttcttttctccttctactcttcgacttcaggattaagttacagttggaatggttcctttgagacatctctttatttccctcttctcatcctgatcaattcatgagtagttttcaattggtgtgccctttttattgcctgttgctagtatgtcatatatatctcattttaaggactaccgatagaggcttacttaaaatgacagcaaattccagttgaaatgtgttcattttattgagttttacagagtcgtatatatgaaaggtcatcaggttcatgtaaatcatctatgcctgatggtagttgatgctttcttacagattatctgaaccaagcctattagtaatccagtcctctaacaatatgaaaaatataaaaactaaaagatagaatatggttttaaattttctaaattatggatttagatattgccttcccttaaattaatctgtaggcctattaagcagtctctactatcatgcctacagtttatagatatagaaactgaggaacctagaagccagaaaacttccttgtagtctagtacttggtaagtagataagtattagaacccaaatagtctaatttcagactgctctcttagcacagaacatgactcagtatctcactacatgactcataataatattcaaaatgaaaatatttaaatatatagtcccacttgaatttttttttttttttttttttttttttttttttttttttttttttgagacggagtctcgctctgtcgcccaggctggagtgcagtggcgggatctcggctcactgcaagctccgcctcctgggttcacgccattctcctgcctcagcctcccaagtagctgggactgcaggcgcccgccactacgcccggctaattttttgtatttttagtagagacggggtttcaccgttttagccgggatggtctcgatctcctgacctcgtgatccgcccgcctcggcctcccaaagtgctgggattacaggcgtgagccactgcgcccggccgaattttttatattactggaaatttgactgggctttgagctatttatgtcatcgtttttgttataaggctgggaagcctaacccagttgctctgggccacatttctcagtgtaattgcccaagttccaaccttggcctcaccctttccttttctttctttctttttttttttaggcagtctagctactatgtcacccaggctggagcatagtggcaggatctcagctcactgcaacctctgcctcccaggttcaagcaattctccagcatcagcctcccaaacagctgggactacaggcatgcaccaccacgcctggctaatttttgtaggtttttttttttttttttttttttttagtagagacggggtttcactatgttggccaggttggtctcaaactcctgacctcaagtgatccacccgcctcgtcctcccaaagtgctgggactagaggcatgagccaccgtaccaccggtcccggccctttcttatgtctgtgatcataggtactttcctccaactttctgtgccttagcttccttatctgtataatgaacaaataatagcgtgcacagcagaaagttagtgtgggcgttaattatattaacacccatgaagtgcacagaagagggccaactagtagtacatgctcaataaacttttgctagtatgtcatttacataatcttataactaacttccttgaaaataactgcaattctcataaaatatatttagataatgtatagagtccaatgaaaagagaattaaaaacagaccaacaaaaacaaaaacaccctgagttttgtctgttgggtattttttttcttaatttatagtttttgtgctggtgtttgaactacattcttttaacttttttttttcgttttgagcaactacagtgtatacaattatgacttgccaattaaaataatattaattttaataaagagcagctgcaatggtttctaccatttttatgtcttctaaatgctgcttaatcttcagagggaaggcagccattgagtaacttaaatactgttagctctagctcttatgtgatggagaacatagagcttggtattcaggcttgggtcatctatgcactcctcagtccaggtgaagtcaacgctaaataaagtacaaagcctgatagtggacaaatgactggcttatccaaggaaaatgtgagttttgttataaaaagcaggaacagaccctggaaggtaaatatggcagatgtgaagttgcttgacacacattagcaaacatcatttgaaatgagcctaagtattactaccctttgcccacatggtccattaaactggtcagcatggctacatttcagggacagacacagctcttgaggataaagtgccaatgaattagagtaaaactgtcattctccccatattcacttgcagacatgtctcccactctcatcctcctggttcttcaatctttgtctcctttcctcagtgcaccatgttgactcctcttgatttgataatatgtttgaactcctctgacttcttgacgaaggttttctgctcagtgctgagtctgccattcctccttgattctagtaccccagtagcttcaagagaagcaaattccttccaccagccctacccccatatcctgctaggtgaacctatcccatctaatgtaaacacctgtagcaaactcctttgatgcactttcctccctctatcaaaaatccttaaggtgctggatgctctactgctgtaccatgcctaaacacctgccttctcaaattctaggctgtaagtaaaatggagaccactcaacttgcagcagaaaggctttgtcaagaaatgacaatttatatttttatatacattaattttcctttcagctacgattctcattacaaatacgcttaatcctctaatcaaccttagcaaacctctgtgattatgaattttcttttttccctaatgcccatcctaaaattttatttaacagtcactgcatgtctgaaatcagaccagccacgaccacaatgaggaagataactgaggccattgttttgctcagaatattcgagaaaaaaatttaaatatctgtttacttttagctaccatatttacatctggcattcaggaaaaaatctagaatatgtgtattgcccacaaattatattagtttctgttattttattaatattctgcaactaaaaaatatctccaactcaatgaaatcattgctgtggacagggataccgatggaattatgaggaaggacctttttggtcaggtcacatggtgataaacatcgtagcctcatatccctgcaatccttatgggacactatgatgggcatgctcttctttaagcaatatttgttcaacattgaatgcctaaaaatgggcactataggggaaagtgacctcccaaaaagactcgctcagtgatgccatttctactctcaaagggcttatattctaaatggggaaaataagatattcaggtaaaatggtatcacactggtcaagacccctttttgtcggtaaagagaatgaaggggagacattgtcgagctaaacgagtttgccactgcaacctctgagtttcattcttgaatgttcccttccattattttgagctttacattttgtaatcatagcattttccgatgagcttttatcaaacatatgtggcttgggtacggcttagatctttagtcatattcttcatctgtaaatcaggtaaatatcaaaattatgtaaatcctccaaagcaaccaaatggaagattgtaatcaaataagtgcctgcatcttatcactaagttgataaaaaaaatacaaagggctctgaagctaaaccttggagcagctccagctgcagaacattattgctttagcagagaacccagactactgctctcattctaaatggatgagatgggtaattttttcattcgtttaacgaacacacactttgtgcctgtcacaatcctaaggatacagataggcaaaacaaagttgttgttctttcagagcatacatctaaagcaggagacaaatatcaaataagcaagagacacagcaaacatcagagacggttgaaggctctgaaataagaaaattatgtgaggggataaaaagggatgggtggattgtttagataaagtggtcaaaattttttaaaatgtagtatttgaggagaaatctgcataaatagacaaagtgacacattaacatctctgaaggaacagtcattccaccaaaagaacaaaatatgcgaaaatgtagctcaaaatacgtgaaaaaataagcataacaatcattggattcatctgtaacttagttcaattatttaacaaataggctcagtcctgttgttttaaaatactatttttttctcaaagagagctttggcattgtttgaactttcccaagagtcaagagagagatgtcttgtaagcctcaatatcctccttgttgaatgctgctgagctttaaagttgcttctgctagaatgaaatactactttgagtatcctatttcatcttctcttgtctgctagatgctataatgattccccattttacagatcagtagaccaaggcaaagagaagctaagtaactctaacaaggtcaccagccacgcacagagcagcgaaatctaacaatatacaacttctattttagatggattgtcattcttttctccctgaaaacttactgaacaattaccatactgcatcatattctgaatacgaaagaagtaataagcaccatctcttctccaaattagctttaatctatgtgtaaagacaaaatcaacacacctcaaaaaagggcgcattagatacagtgcaaggtttaaaaacaaaagtgttggttagcgttaatatgagttgaatatggcttggggcaagaaaatgttggatctaaccttctttttattttcctgcccgtatttatataagaagcaattgcagagactgggatggttagcctggagaagagaagactcaggggggatttgataactgtctacaaacatttgaagagctgtcatgtggaaaagaaattagatttgttctatatgtccccaggggtgaaagtgatagaaagatttcatcacaatataaggaaggactttcaaacaaaataaggataactctaaggctctctaaagatgtaatgggctctttgagagacggagtgctctgatccgataggcaggacagccttttcaatgacatcttgtatagggaatcaagagaagggtggatggttcacatgaattttaaggtcttttctatggctgagaatttattagtttatcagtgataaatgaaattttgcccaatacttagcctcttatgaggttcagaccttctttaaagagtgttttagagagtactcttaaatgttttggctatcatatctacaactctgcatgttacttctggtacttaattgataataaataatcctcttaaggtgcactttatttcttgcttgctttttctaggtctccagccatacaccaactacagcttcactcttacagcttgtacatctgctgggtgcacttcaagcgagccttttctaggtcagacactgcaggcagctcctgaaggtaatgaaacaatatccatggtttgagggaagaaattttcacatagcattttgaggtggaatctgtaaactccttcataacaaataaggaagaggcaataaagttgataggtacaaaataaaatagcattctaggttcccattcttcaggcttgattcatgtaggtgtagcttcccaaggtcagttcgctttcaattctttaacctttatagagttgattttctgtggaaagaagaattattgaaatttttcaaaaactcagatgttaaatattttgggagcatctaatatataataagcaccatgctcactgctgaagttgtttaaaatgttctctgccctcaagactgacaatcaagtagaagtgataggagaaagatctgtatgaagagagaaaatctgaaagttgatgttaagaaagaacaaatgaatagagtgctaaggttggcctgaagaggaagagatagaaacccatcgatgacatcaaaaaaggctttatggagcagatgacttctgagatggaccacaacaaacaaggattttgacaaatgaacagtgatgtacagagatgtacaaccagacacagttggaaggaatgtaagatggaatcatcaccttagaaggcaaattgcaaatgtctatcacatttaaattgttaatttcccatgatacagctgttctattttcatcatttatgccagaaactgtgccacactgctcaaggaggcatgcaccaggatgtttattgaagcatttattttgtttaatagcaaaatgttgggagcaattttaatgtttgtgagtagaattgctaaataaattcagctattctcatattgtggaattccatgcaccagtataaaagaatgagatgatcagttcatacaaagaggaagttatgacattatattaatttataagaacaaactgagaaaatggcatttattgttaatggttaataaataaatgcatttaaaaatccaggaagtatacacaccaactgatagcaatggttacccatgtgttcagaggtgggatggctggtgtcatttactttcaaaagaaaaatatactcagtggcatgtgttagtgatcaactaattattttgttaatcttcattatctgcctatttttcatatggggaaaccaaggcataaataagtttctaaacagaaatgcaatgttaattaccaccatagactcctgaactacttgtccattactcttctaatgaaatggattgttgtacctcggaatattagacctgaacttcctaccagtaaatggggaataaaatggaaaattccacatatggggcatatggctcctcaccaggaattcactaatgatgttttctatataaagaatgtttcatgtcaaaaagcttagtgttcctttgaaaggaagaaaccagcagtggattttttggaaaggtaaactatcaaatggatactttgatgataatggataatttctaaaggatctatcaaccagatttggctgaaactcaacctgataaaataacagaatctcttgttccatttctctctaccaaattcatatatttaaattcattggaaatatgaaattttcccaacaaaatttcttgaaatgacttacattttatgacttaaaaattgtagctttcaacagtgcagggtaatgtgatatgagaaatgcccttgatttcttttttttttttaactttatgtatctttcctctaacacaaataatcatgcaaagaaataatagatgaaatggactttcctctgcagaagaaacatggatttagggccattttctggctgaataagtgccatttatatataacccatatatgaaataaatatagtgtgaatgcttaacttgggaacaccttagcaatcacattaagttctgttgttttactgtaaagtgaaaacaagtataccactttagattatccacccagacataactaattataaaatgccattttcgaagtacatcagatataatttgaagatctcatatttgagtattttaagtggacatggaaagaattaaaagaagtgtttatgcatagccaacgcaagctgagctcttttcacttgcctctcattttcaatctaagaaaaagtcaatgtacattacaacctcattgacaagttggacacagttctctacagttttatcctcatagaaaactgtgtacctgtacctttagtcaaataacaggaagattttgaattgaattattactctttttttctacaattactgccatccatgtgagttctaattcattttagagataaatcatgcaaaattgcagacatactttcctctagcattgataatgtggaaacagaaaggaaaagaagacccagtctttttcagttcattccagattcctcttcctctgcccttcttttaacgtttacacacccttggttttttcctctactctttacactatagcacccaggctcttctggaattttcgagtactggctttatctcctaatgaaggctgagagctaccaaatactaaagctctcaccaaagctacacttatggatttaaatcctatgtatttactggtctactacatgtttatatttaggtgtttttcaaaaactttaacctcagtacttcgccacttaattcttccactccactctactcctcaacttgcttttcttctctcaaatactaccacctacctatcacctaagcccaaagcttgacactcttgatggctcccttttccatatgtaatacataattttttataaaatctaattagttttaaatcttaagaattttttttaaaaaaattgttcttctttcccgtcccttttaacactgccttagttcagatcctcatagctataagaagagaagttctctggatcctcctaactaggatcccttcctctagtcatttttcctctttctcacatcccacatcctgattctttttcctcttttgacaaaataagaatatgtcatattattcacctccataaagtcccatttccttccaggaagacatacatccatatctccttagcaaagcaacatggacccctcaagttttaacttccatcaatttttcaaggctttccatcttccccacatgccatgcagtgcaccagccatgccaaggtatgtgcagtcctgccatccttgcccacatttctacgactttatgtgggttcccctcagcctgaactccctttccctacatcctcactcagttaacgctcaccttttcaaaacttggttcacgcatctccccttctggaaatcttccactacaaccacctacttcctacccatctccacttctccccacagtctgtgtcaggttaccctttctaagtgttctaacagctactgtgcctccttctcttaaagcatgtatcatactggagtacaactttttatcgactcatctttattcaccatgatacatgaactccatgaaggataagaaaaagtctttatcttcccatccacagtgcccaacacagaaaatgacacaaagtcgggtagaatgttgagtgaataaattaacaaatactaaattgtccagaattcagtgcatccctgacatcagctaatacaaaatttgttcctatcaccagatttcaggagaaaaacaatccacaataaatgctgggaattttgaattggaatgaagatttgtagggacatgagaagtgggtaatatggcatgcaactcaagataaatttaaaacaaatacagtagacatgttctacttgttgtcactgtgtaaaaaggcccaccaaggtttaattctacctttccccttttaaccttgcagctagtttaccccaccccatcctcctaggttacttccctccctactattcatttctttcacttgaactgcctcagtttgctcccttattatatagaataggtttttctggtttcacctgagacttaggccagagttacatggtgaaggggacaaattccccacctcggactcattaatatatctcaccaaagattgtcttactctagcaaagatttcttgcagctgccaagataacgatgtccccatatcaccatccaagtaaaaatgcagcactttctagttatatatacatttgaactccatattatcaatcaaaccaatgggcatggagttattaccaacttgaaaagagcttttgccagccggtataaataataaactcaacttttacctaaaggttgaaacaaacccaaaattatgtttcattttattttattagctcctccacatccacaggctttattgactggttcaaatcagaaaccaagcaatagccattctagtaccttggtgatttttaatacatcgttcaaggtgaaaaagatataactgcaggaagcagattatgaattaagattttatactttatcttttgaatcaacaaattaatatcacatttaaatcaaaactctgattggttgaatcatctagcagctgttggcagagaaacccacatacaaatgtgtactatgatttgtgaattttaccaaatatctagaacagagcagactctcagaacaaaatgaactactttcttctcaggaatatattgctccttagaaagttgggatgtttgagacatttttgaaatctatcttgtttctttcaggatgctgctaaataaattgcattttgttcttctgaaaatttttcttctaaaagtgtcaaaatcttaacctgtacggagtaacttacacaggagatacaatcaagcaaaagctattgattacagggaacctaatattgaaatgagttttttttaatctccagaagagatttacagtgtctaatcagagtataactagatgacaacataaagtggtaggactgaactttctcactgctggcttctccatcgatggatttgtacatctataagagtacttgaatgtttgacattgaattacagttgtttgtgtgtatattttattttttagacagaagtataaactccttgaaagtgagccacatcttagtcatctttgcattccctagaactgcctgcagtgcttagcataacattttgcaggagatatatttacaataaatctactcattaaacatgtattaggcattgtgttatccatagagatacattgacgaataagacagagaagatccctgctaccatggaactaactttgcatcaaagtaagagaaaggagaggactgcaccatcatataatgtaaaaataatagtatgtcaaagaaagaatttgattatgatgtcttgagtgttaagaaggaaatagaaaaggccatgcgatacagagaaactaggttgggactccattagatggggttcaagttagagttaagagagtgctaaaatgaggccttatcaataaggtgatagttacacaagtaactgaactatgagaacatatgagaacattctacatataagaacaattctacatatgagaacaaaatgcaaaaatgtcatgctgtaagggaacaaaggtgttccaggccaaaggaaccgaagttcaaaagcccaggtgtaggaaataactagaagcattctagggatagaaaggaatctggtatggccacagctctgtgaatggtgcaaagaatgctgccacttaggccagagccaataaaatgtgggaccatatgggtcacaaaaagaaattgggattatattatatgaataaattcaaaagggttatatggttcataaagatgacactggcttacatattcactttatacacttttacaaagattccaatggaatatggaaggccaagatttcgacatggaggcaagtttagaagctatgacaggagtttatgagagagagaaacgtggcttggaccaggagaagtgaaagtaaagatacaggaaagtatacattatagaatcttctgggctttatgttagattacatttgggcgtatgaaaggtgaaagtctcagggatcattatttttgtgtgttttgtccaagaaaatggatagatggacaagattgggaggtacatagattgtagacaggaaaaacaagagttctgttttgcatgtttttagtttttgatatatcatcagtcatccaaatggaggtgtcaagcaaacagttggattcttgagtctcacactcagagtttcaatctagagatatgcctttgggggtcttcagcatatgcatatttaaaacccatactgaatgaagatcacctgggaagccggtgttggaagagaagagaagagagaaaaagaagaagagaaaggaagagagaaaagcagaggggagagagagaacagagcatactgctctgaggcattacatcctttcaaggtccaggaggggaagagatcccagtaaatgaggccagaggcatagccagagaggaaaagagaagcatcacactgatgtgcaagaagaagggaaagtgcactcatttgttgaattgtataattcaggtacatactcgattatgcttactttcacatattccaggtaaattgtattaaaaagtttgaaatccccagatgatctctcaggccttgatttaaaatactctcagagtgacaaccaaggcagagaaattatccactgctagttgtctgacattcactttccaaaggcaattcaaaaataaaataatcaaagtaataaaaatatatttacaccaattatgtatttttgttccatacagttagatattttttaaaatcaacagaaaaaatatcacagttcatgggggggatggtgtgacttttgatacactgtttattttctcctaacaataaaacctcattgcgttattcttgccaggagtttgggtgacacctcgacacattatcatcaattctacaacagtggaattatattggagtctgccagaaaagcccaatggcctcgtttctcaatatcaattgagtcgtaatggaaacttgcttttcctgggtggcagtgaggagcagaatttcactgataaaaacctggagcccaatagcaggtaaactaaaagaaaactttaccaatcatacagcaggatttgtacatttctctgggttgataagaaatgcatgtcccactgaaagttgttaaattgtttaattaacttcctcattcattggccattcaataactgatgaaagtgctaaatcattcagtctttagacttcacgaaatttcttaaaaatataaataattcgtcttctgtttgacataaaagcatgagaatttttaaatatacaaaatacatgaagtattaaactttaaaaattaccaaattatcttcaaaaacacgcatccttgaactagcaataaaagagatgtaaagagttttgttttccgtcaactctcttttcttcttgtacagtgtttctctacttgctacaccacatatagttgtgaatagttttagaggaaaaagttccacatatttgcatttcattcccattcatttctcagcagagacaaaaacatatcttaaatcaacagatgttttactgtagaaagtagagatcaatttcattttattgtaaggaatagcagatcaatttaaaaacatctttctctaaacatatttccctgaactccaacctatttaaaaatggggaagattaatttgaatcctccacaatccaccagcacactccaagactttcctgaaatcttcaagaaaagctatgaattactagcaggttaaaaataaatttaagagcagctgaaattacaatggcttggagacaatgttgcctgtgcaagaaaaactaccaagtcaagtttctggaaagggggcaaagagtttgcaatttgtcacaaatttaggactaagcaattgatacaaaaactagtaatcattgttcaagtctcttgtgcatggccttaccacaattcttctttctttttaaatatagatacacttacaagttagaagtcaaaactggaggtggcagcagtgctagtgatgattacattgttcaaacacctatgtcaacaccagaagaaatctatcctccatataatatcacagtaattgggccttattctatatttgtagcttggataccaccaggtaaaaaaaaaaaagaagtatgtgtgtgtgtgtgtaaacattttaaaggaattaattagagataagaatagaactgttaatttagtaaatcagaaagacatagtcggtctcctggataaatatgaacagaaaaatctaaaccacacttctaagtgtatagacgcatgagtacatacatacatacgtagagatataggtatctagatgtcgatgtagatatgtaagtatatacagctttctatgaaagcaacactttcaagtacaagagactaaaaatctttttactcatctattttttttttttttttgagacggagtttcactcttgttgcccaggctggggtgcaatggcgcaatctcagctcaccacaacctccgactcctgggttcaaacaaatctcctgcctcaggctcctgagtagctgggattacaagcatatgccaccatgcccggctaattttgtattgtttttagtagagacagtgtttctccatgttggtcaggctggtctcgaactccagacctcaggtaattcacccgcctcagcctcccaaagtgctgggattacaggcatgagccaccacgcccggcttactcttctatatatccaatgcaagtcatataggtcagaattaccttgaacattcatttccatgggactccttagattggatcattgacattataccattccttttatattaaatcagtgaatggggagtttggaaagacagttgttcacttcacccatgtaccttgggttgtgaccacttatggtagctgcatttttcctctgtaagctgaatagccttcattgagccatttagtcattattgggttgccttgtgacttagtgcaacattatattttgaggtaagcaccatcctcaggtaaaatcctgactgcattaatactgtggagtaaagagtagagtgagaaaggacatatggaggacttttctttccaagtaaaatttaaaaatggttaagatgttaaaaacacttcaaaattatgtgactttatttttaatatctagtcttaagatgaaattgtgacacgccctttttgtcgccatcagaataagtttagccacagttcaaagtggcaccaaatggttaacagccatttgagccatcggtagatccattccataacataattaacataagcctatttttattgaattgaacagtcaaaacaggtactattgtatagctataaagagagcgtaaagacctaatacataaaacttaagtttcttatagaccaacaccttctgctataatctaagatcaaagagaaaaagttattttcccctaaaattcaaaagaaagtttacaaagagctttataagcaaagaaaaatataagttgctctaagatattaaatgtacatgatttcacccacttttgtttaaaataaatgtgcagcatattaaacaaaatataaaggaataattagtagtggcagaatgcatcacaaagtgctataatctttatgttgtaagagcatagatattcttgaactctgttcttaatttcgatagaggaaaagacatatcttctgctgtgggaaatatataaatttacagccccctttacagaatttatttctacttttgtttaattttatttatttatttatttatttatttgtttgtttgtttgtttgtttattttgagaccgggtctctctctctgtcacccaggctggagtgcagtggtgcaatctcagctcacagcaacctccgcctcccaggttcaagcctcagcctccaaagtagctgggactacaggcacacaccaccatgcctggctaatttttgtatttttagtagaaatggggcttcaccatgctggccaggctcgtctcgaactcctgacttcatgatccgcccaccttggcctcccaaagtgctgggattacgggcatgagccactgcacctggccacgattttttagtatatttctccttggcatttttattgtgctgttgtgtttttgcaccacaaaataaaatgaagctggatagagccaatctaataccatatttagcctattgacaagaaagttttagatttagaccagggtcttctacaatccaaattctccaagagcaatacgggaaatttcagggtgatgagcaaggttgatgatttctttgccatatgactgggaagtcccatggtttatcaaaatatctgttattttaacattatttaacatatcagttgccattgctaatctgaagacttcatgttcagtacgaatttgaaaatatctttattttatgactatgcaagtaagagaaatgaaaaagcctggattcatatcccaatactgccacctattagctgaacttaaacggtctctaggcctcaattttctccatctgtgaagtggagataatgatgatacctacatgtaggcaggtagggttgctgtaaagatcaaatgaagtaatttatatgataaatatattatctagttctatataatattctatagataccaatggtgattgtttgaagaattatttttttatctttaattgctcatttttaaaacgtatttgttccaacatttgctgggtctcaaagccccaattttcaaaataataaaaccacctactgaggattggattagtaaattttcaagacctctttcaaatttcccagcgtgtcatttttttctttgaattcaatatcacacttaaatgtttaatgtatcatgtttccatttagaaatgtatcattgtggaataaaacacaactttcacttgtttaatatgaccttaactctcacatacctcaggctttgtataaattgttcattctggtccagcctaggggatattgtagaatgctttacacactaactctgaccatttaaccaatggttaataaatctataatattcagacctgtcaatcttatagtttaagatgcacagaatccatttcagaaaccatataatataaggaaagattaaaatcttcaattaaatctttttcctggtgtctagaaggatttcaaactcagtaaacagtcagatgattttgacttgtgtataatctacagttgattttattggaaagtacctcatgctgtgttttgatttggataataaaaacatgtttctattcctgaatagtcacaaatatatatattttaaacagaaagaaaataaatttgtaagtggagattgtttatttgctcacaatataaagagttttctaggtattcatcatactccctgccattacaaaatgactacatcacagacagagctgaataatgggcaaaacagtccatgcctgcagttcccaaacctgaatgagcattagaatcacctaggaagcttgtgtaaagacagattctcaaccccaaatttactgaataagaatctcctgggatggagtcaagaaatctagagctttttaaaaactccacatatgactttgatgtgctaccaagtgtttttgaaatagtagcccagaggaccaaggaacagatctaggtattgctgaaaccaaatgattctgggagaacaatgtttgactgggtgtgtagtggcgtgccaagactagaagagttaattgtggaaaatggcaagccgctgaagggaaaacagccacgtgacagcaatgatctctgcagcatgaagaaactagtaactagaaagctttacctacccatccaaaaatctaaaaggaatagatgtgatttaccaaaaacatggatcacactcaccaagtgagactggtgaattacaataactgttttctctgaaaacatgagtccgccagtttctcttgaatgtctaaagcaagcttatccaacctaaagcccaggatggctttgaatgccacccaacataaattcaaaaactttcttgggatctttgcaattatttgttttagctcatcagctattgttagtgttagtgtgttttatatgtggcccaagacaattaatcttctttcattgtggcccagggaagccaaaagattggacactcatggtctaaagccaaaatactggctaaattgtatttgtttttttaaatatgcatttttttttttgtggtcagtgtgaacagagtaaccttagacaggtaagctgctgggaaaaaaaatgtctatgtggttacttggcaactgaaaaattacctaagcaattaactgaattttcagttttcaaactattgttctaatgctataaataaactaagccttagtacatgtttataagtcctactagtgaaagggtaaggtctagggaatagtgacaatacccaggggaagagtacccgtgatactgataacaaatgtcgtgtacatacgttcatattacttggtgtatttgccatttgttaaattcctactatatgccaaacactgataagctccttctctgccttacctcagttaatttttatgcaaacgctagaagacaggtaataatatcattatccccatcttaagataagaaattcgaatctcaaaaaagtaatataatatgctcaaggtcacactgcagagccaggattcaaattcaggtctactgtctgctactgccttttaagaccagttcctttctgtctttggcttaacccttaaatccaaatcgacttttcatttcttgaccaaagtctctcagatttatgatggatcaactatgatgtttgaaatagtagcccagagggccaagaaacagagctgggtgttggtgaaaaccaaatgattctgggagaatatttttttttaattttttttcttttattatactttaagttttagggtacatgtgcacaacgtgcaggtttgttacatatgtatacatgtgccatgttggtgtgctgcacccattaactcgtcatttaacattaggtatatctcctaatgctatccctcccctctcccccaaccccacaacaggccccggtatgtgatgttccccttcctgtgtccatgtgttctcattgttcaattcccacctatgagtgagaacatgtggtgtttggttttttgtccttgtgatagtttgccgagaatgatggtttccaccttcatctgtgtccccacaaaggacatgaactcatcattttttatggctgcatagtattccatggtgtatatgtgccacattttcttaatcctgtctatcattgttggacatttgggttggttccaagtctttgctattgtgaatagtgccgcaataaacatacatgtgcgtgtgtctttatagcagcatgatttataatcctttgggtatatacccagtaatgggatggctgggtcaaatggtatttctagttcaagatccctgaggaatcgccacactgacttccacaatggttgaactagtttacagtcccaccaacagtgtaaaagtgttcctatttctccacatcctctccagcacctgttgtttcctgactttttaatgattgccattctaactggtgtgagatggtatctcattgtggttttgacttgcatttctctgatggccagtgatggtgagcattttttcatgtgtcttttggctgcataaatgtcttcttttgagaagtgtctgttcatatccttctcccactttttgatggggctgtttgtttttttcttgtaaatttgtttgagttcattgtagattctagatattagccctttgtcagatgagtagaatgcaaaaattttcttccattctgtaggttgcctgttcactctgatggtagtttcttttgcagtgcagaagctctttagtttaattagatcccatttgtcaattttacctaggcaataccattcaggacataggtatgggcaaggacttcatgtctaaaacaccaaaagcaatgggagaataatattttactgggggcatcaaaaccagaagaattatttgtggaagtggtgagcccctgaagggaaaatatccacattgcaacaatgactttttgcagcgtgaaggaagtagtaaccagaaagctttacctacacattctagaaggaatagacgtgacttaaaaccagattccaggtgtaggaagattttagttaggtgggaggggaggagagtcacttctcaaattgctgtaaagagatcatccaaattctattttaaagccttggtaaatattcccctgtctcccatgtaaaccttcatccactttaccttattctttcttgataaatgtcagtagtaacattaccaaaacactctaagctctagaaaatcaagatctctagccttttgtgtatcatttgaacctctaaatcaggtgacatacaaacaacatatccttataaaaattttgctgaattaatggaggaacacaatggtgagcgagcctccacaatttattatgcagtcaaatgtaaattgtggatatcctgccatttaaaattactcaaacatttgattttctcttaaagtcatccttcgtctacattaacttaatcttaaacagagacatacacacaaagagagagagaggcagagagacagagagagagagacatttcttctttaatgacaaacagagcacatacacatattttccaaagactgcatcttgtcttatggatgtgcaattttttcacctttcagaaaaggtggtattgttttctaacatggaatgggcttcactatttagttgtcctctggccttgggcaagctgcacaatgtttctcaaattcaggtttctcatctgtacaaggagaaattaaatgcctaccttatattgttatatgaagtaaatgagatggcatggtaaaactccattattgtttgaacctttaggtaatgtaaacaaccttagattattcctaagcattccctctcaccttttaccagctctcaacattgggtcaggacttttgtattcatattaaagagaacatttatattaaagagagcaaaggatatatgttaccttaataggtgaaaaattatggaaaattaaatagcaaatgcttcatggaacataagtggtttactcagaatgacaatggagatagatatccctgctgtttaagaatctaaacattcaaaattatttaaactctgaaggtaataatgagtctttctaatttatcgagatgatgactatattttgaactgttctagcccttaatcatgttctaattaacaatgccattgcatttaacacatactttttctcactaaggatggtgagtcatttaggtttaacgtacaatatagaaatactggtgcttttcctttaacattaatatcttactccattaaagaaggaattagcaagaattctactgataaataatttttattaatattgctctagaaatacaaatttttttatttatcattttgattaaaggttagctggccataatatggtctatttatggacattagacatcttggcattcagttaactcatcagctgcagtgtattatttcagatactatgcatttaaagtcaaaatttacattaatctttctaaaggattcacattacattaattgggatgattcaacattgacagttgtttcacttttcttaacttataaatgcaataaccaaatgacaaggagtggtgagtttcagaagaaaatgtgaaactcacttcagtggtttgtattttattttggatattttaaaatgtatctttcattactgagctttaatatatgctaggcattttgctaagagattaacatatatctcatttagtgttcataataacttaatatagtatgtcctattgttttgctcattttactaatgaaaaaggtcaatttagacactccaagctattttctctaggttattcttcaagcaggtgtcagagcagggctgaccctcatgggtgtgagtccaagtctgactcaaaactactattctatattttctcaatatttttccacctaaacgtgcggaaagcaaatgatttttcatgagttctactgtaatcccatttaaaagctaaaaaactgatttttgctttatatataggaagtatgaatgaggacaatgtaattcaggatcagtcgacccagtaacccaatagaataattttatttgtggctcaaaacttcatgagatgtaattcatttgcctttgggtatattgattcctctagtcatttaactaacgtggaaattatttctgagccccactcaggggcaaaacatgatgctggacaccctaaaagttacaaagaggaatgagacactgtccctcttgtcaggaaccctaccatctagtaaggtagaaaagacataaatgataactattatacaaccaatgttaaatttccatacaattggtatgaatgagttcaagagggtcccgttttacttctgttcccccaaaaaggcctaatcaaggtttccctacctatacagtggagaatttagctcgatttgttaaaagcaccatgttaagtgcaaccaagtgttttgaaacaaatgcctctatcaaaccgaattaatagtttttcctcttagaatttttcctgttccagctcctaaaaaaagacttaaaaaggattattgattgacttgtcccattgtaaagtatgcacctgctgtgaaatgaagccatggagaaaaatagttgaataatttaacttttttatttgtaaagataatcagggtttttctgattacatcttaacttcataaatgttaaataacctatcagcatctagttgttgtaaattatgaaaaggagcattgcaaggaatattaaccaacgaaatccttgttctttagtgaacaagaaaatgtgttatggcagcttgtcattgtgcgactggtaactttgacaccaaataacaaaactgccatttgcacttagggtaaattggttcacttgagcttccactgctcctcttgctctgacataaatttatgaactcaggaactaaccaagtcgtgtggcttcccagctgactttaacaaatatgcccatttcatttcatttagtcatcagaataccagggggctcagtcatttcagactcattgcagatggtatagggtttgtaggaacaccagagactttcgtgtcacagtcctggaaattatgatagtggagggggcccactttcctaaatgcatgccagtgttttacgtgttcacagcttagaggagcattttctgtttcagcacctcataggtatatgtaaaggacatttatttccaattaatgaagaggtgaaaaatacattttctatgctcatggtttggctagccatgtttaaatctggattaagattatgtttatatttgacatgcggtagaagcacagttttgttccttcatcctctgggagtcctgtcctttttataacagaagttacttcttgaaggatgcaaggcctggaagcagaacagtaggtacagactgaagacataaagtaaaacaacctcagatgaattggagggaacgccactccaaattactgctaacaatgaataatacagtattttcgtaggaatgcaatttgatcatatccaagtacacataaaaaataaaactagataacaaaatagtgttacaaagacattaacttgaatgaatgtaacatttatttgtagttggaatagcaactttatatgaaagatggattcaaaagtgtttgagggcacatggaaacagtgccatagttgttttttgttctttatttcattttgttccattttgtcttgtagagatgtcagccatttattaagtactttctatgttatgggaatatattgaaaggcttacagatattttctaatttaatcctcacaactctctatgaggtagctattagtatcatcattttacacatgaagagacaacatccatagaggttagttaatttgccagtggtcgcttgggaaataagggcagcagaaggatttgatctatctgacaccactctgtggtttgtctagttcaacaagaatgatggcatgtttcttatgaatgtgtgtctgtcaaacttttctgcaagaactgtcctaggaacaaagaagacaggatgaatatgcaatcccaggaggtctgaaaacagagcctgaagcaatcatcattagcttgcagtttctttaaggtcttgctttttatcttaaaaattcatgtaaatttgccattgtattccagtgtttgtcttcatccaaaaaataatatattatacaacttatcatttgggaaaacattttctactaatctcattggctaaagagtgataatgctgttatatttcatgatattaggaagatctaaagaaaactaagcccaataacaggttcaaggtcccggcaattcttcccctcttcattttgtcataaatatgtgggttcaccgtgaggcagaggttgcagtgaaccaagatcatgccactgcactccagcctggtggcaaagcaagacttcgtctcaaaaacaaaacaaaacttgggaggccgaggcgggtggatcatgaggtcaggagatccagaccatcctggctaacaaggtgaaaccccgtctctactaaaaatacaaaaaattagccgggcgcggtggcgggcgcctgtagtcccagctactcgggaggctgaggcaggagaatggcgtgaacccgggaggcggagcttgcagtgagccgagattgcgccactgcagtccgcagtccggcctgggcgacagagcgagactccgtctcaaaaaaaaaaaccaaacaaacaaacaaacaaaaaaaaacaaaaaacctgtggcttcaaacaacagccttttattcctcactgctttactgttatggcagggtaacaatagggagaaatgcccaaaatgtgatatggaatgctttgtcattctaggatactctggatggaaatttctatcagcatatcctcctgctgaaggtcaaattgcaaactgagagggtccccgattccttcttcaatctctcttaccacctcaagcaacaccctccaaaaaatactttttgcggagaggaagaagaaacctgattatattactttttattttacctctggcacagtacttaaatttttctcatccattaatgaactgagtctcaaatggtctctataatcaattctccttatccagctctcaaatttcattttaattattgcagtcttgttgagagcagtaaaaactgccagttttgtcgtggagtggtgaattaggcctcgaagaatagcctttaaataggcctattatgtgtattcaccataccagtaaagagaaaaataaagttattttttaggcatttaatttttgttatgatatcttttcctgtttctttatggagaaaaatagtatagaactctttattacctgaaacaaagtggaagtgtcatgggtcaggccaacttttcatcccatgtctagggtagaaaatccacattgagttcactttaaagcaatagcgagagactaacattacattgtcctttggttacagtatgaacagttatacttgttcagcacactggcacatcagcataaacattttcttgtgtcctacagttggttcattctgtggtgactacagagtcttcaactctacaattggctagcaaaaattctaatcactcaccatacatacaattctctaatcttgaacttttagaaagaaaaattcacacccaatttttgtgaacaaagaaacggggattctgctggttccccttcctcaaacagggaaatcctgtgtttcccaaattttccatatcaaagtgatactccaaaaaaaggcacagtaagtccttaaggtcatgataggttcttggaaactgcaattttgagtcaaaagatatataaggaaaccaattttaccttaggctagttgatataagcaagatttaagttgcaaggaatatttgtggtcacaaaaacgtcaccaaactaaatatcatcaaagaaagaccaaaacacttctaatattaaactgaaataaatatgagctatacatacatttaagaaagattaatagaaacaagtaagatcatttttaacctaagttttggcaagtcagcgagtgacaacagccatagggataaatgtttttgagcagaaattagaagaaattcttcttaccaccatgcactagtaaaaacaatcgcaagtagggcaagctcacagaaggcttttgtacagcattatttattattatgcatctatatgatagtaacacacttaatgaatctttactttacaattattcattcattcattcattttctgacacaccttttccagttcagggttggggtggccagggcctaaccaggcagctcaagaccattccgttacagggcacacacacacacccacactcgctcagactaggaccattcagacacaccaattaatttaatggaaacatctttaggatatgggaaaaatccagagtacccataaagaaaccacgcagacatggggagaatgtgtaaatttcacatagacagtggctccagctgggaatcaatttttttcctcataaatattaatgaaacaatgttgaatgaaacaacattattcgaggacctacggtactatgtttgttcctgtctttgaatatactttgacatgagcccacaaacctccaaagcaggtgtatttcaggttgggatacttggtctgcagaactttaaatttctacctataatatgcttgttccatcagtaatgatttttacttatccatcatttgtttccttgcttcggaatagtctccaagaatggctctgccttactgcacaaattttctcaaacctatcttgtcatttttccccaagttgtcctactctaagactccattatcaaggaaaagcataagtatattgatataagtgttgatatcagatgggcctaagttcaagtccttgcttctccaattaatcagtgtgcaatctggaacaagttatttaacttctctgagttttagttttctcatcttaaaaaatagtaatatttaccatgcagtattgtcttgagggttcgttcattcattcaatcagctaacatttattgagctgctactttgtgctaaagtctaggcagtggaaccacattggagaaaacaaagtcctaatttatacggttgacattctagtagtattaaatgggataatgcgtgttgcctggcataacacagggatgcattgaaatgactcttgtttgtactacttctgcaaacattgtaagactttcaaactggtttccctatgtcttgtctctcatgtttttaagccactattcatttcccaacagtgttatcattctaaaatataggtagactcttattttcttatttatacctgcaaagtctccttgttgctgattatatatgaagcccaaatttctcaaagaattaattgataaaatttagtagtcacttgagttttggagtgaagaaggcaggatccactctaaaagtcttactctaagatttccatcctaggaaaatgggaagatggtattatgacttactgaaagaggaaacctaggaaaaagaacaggtttgggagtggaaaatacagctagttctgttttagaattgttgagatcgtggcctctgaggaatatccatgtagaaatacctagcaggctgttgaaaatacaaagctgtaataccggaaagatagaaagctagagataagagtttaggaatcaatgatagaatgttagtagtttaacctactagaataaatgtaccagatagtttagccatgatgctctaaatttaaaataaacattctcagtctaagctgccaaatttaacgcaatctagcacctttcctgaggaagcaattgatcagtacttctgaagatgatcaatatctccttcagacacctctttttcatctatcctacacaaaatcctgagcatctttggtttgtaccagctcttccactctgtaaatacagaggccacatctataaaaagcaaaaccacatttcattctttagacctcatctctcttaggtcattgagtcctgtgcttcctcagtaatgttatctctagattccactgtttctaaagtaaagatagacttatgtgggtactacagaagtaaataactaaactcataaatgttaaaaactctcagatcaaggagacaatgtaatagaaaatgccattatattcttcattcaaaactcatatcctctccttgaaaaagtatgcctgttgttcatgaccaaataaaacttaacaagcatttaattatataaatagactttgacgaggctaaactgacaagacctactttctttaggaaggaatggtgaaaaatgacaattgttgaacccaaattttcgctgtatttagggccataagtctcactgacagtgaactgtcctggcccaataattaatgcactgggaattctctaggtagaccatgatttggatatttcatgggctatgtcaaggatccatgtcagacaggaggcatacacaatgctctacagaaaaattattgtcacaagcaaaattggtgttgttttctatgaactttaaaagtaagtaaacctagaaaaaatataggacagcataattgccttatatgttttaagtgaaatgtgccttcatttttatttgccaatagagtatatctttaaatagaaatattatgcttttaaaaatagattatgtacatttcttacttttggaatacacaatctaatatttgccaacttaacttttgtgaagcttttaattgctatattaaaaagtaatttacttttctattacaactttttttttttttttggaggcggagtctcactctgtcgcccaggctggagtgcagtggcgtgatctcagctcactgcaacctctgcctcccgggttcaagcgattctcctgcctcagcctcccgagtagctgggattacaggcacacaccactatgcccggctaatttctgtatttttacagggtttcaccatgttggccaggatggtctccatctcctgaccttgtgatcagcccacctcaacctcccaaagtgctgggattacaggcatgagccaccacgcccggcctcaattacaaaattttaaatagacattatttttaaaagacaaacatttgttgcccattctgttttatttatatatatatgtgtgtctatatatatttatttatatatatatgtgtgtctatatatatatacacacacacacacacacacacacacacacatatatatatatatatgtttttaatgttctctctctctctctctctttaaagggatcctcatccccgaaattcctgtggagtacaatgtcttactcaatgatggaagtgtaacacctctggccttctccgttggtcatcatcaatccacccttctggaaaatttgactccattcacacagtatgagataaggatacaagcatgtcaaaatggtgaaagtctttcagacacttggcctgggcttttatgaaaaagtatttcattaaaaaatttcattaaaaaggaatacattctcagtccaaatataaagactaacgtttcacttcttatttgtagtggactgtttacccagaaaaatcacagtctggcatcgagtaaagcattatgcatttctgcacattaaatcataaatatttaaatatattaaaatggtggttttgcaaagtcttgttttataaggccctttgaaagaaaaacacctagctcacataaaggagtctttggtaatataaaacaaaaatgagtattccaaatatttcatagaaaacatatttaccttggccttatttaaattttatccaggaggaggaagtgagaagttatttaagagttgaattacacccaaatgaatcctatatattttatagtgcttccttgaaccctattcatatatacaaactatcaccttgtgtttcatggcttaggctgtggtcagtgaaattttcatgtatctgtgttgtgttaaggaaaagcctcccccatttcctttatcactccaaacggataagtagctaaatgtaaactgtgatttaggaggggagaacagggaatcaagagagctatacatcattttatttatctcttttaaattaagtataaactttaacagatatggatatgttatatatgtgtatatcatatataacatgatatatgtgtatatcatatataacatatgatatatatgatctcatcatatatgttatataacgtataatactcatttgctaaataaagaaaacatgtaacttaccttagtataaaaaacattttgcttcaccttaaagaaatttatcagactcaatgtgtagtggaaactcctgtattgaatgtccttaggaatttctgtttccaaatagtgctagttctcatggagttggttagaattatgagtctgcaattttgctctgctgaactcatcagaaatggctagtcagtttgtccttttttctctaaaaaatagaccatggcatttttgtttgaggggtattgctttctctgatctgtcttcacctgataaacgtgaaaataattttaaattaatgttttcttgactcaagtacaaagtcaacgtctgcatctccgtgtccctgaaactgtgcaatggaggtacaatatccttcaaatagattgttttattcctgtgtgtttgaataatgttcatgagtttaaaatattggcaaaataaaatattattaaaagcatgcaagatgtgtaggtcacacatacacttgtgaaattcaagtgcattatcactttctggttagaatgactataataaactagagaaacttgagttcagacaagtttccttattattccttatttccagacaatatgccttattgtttatgtctatataaatatgtgactaattaatgggttttccaaaaataattttctatttaaatgttcaaatcccataaaaatttatttaaaacacatgtacaagtatatatgcaaaaggacaggttaaaataattttcatgatatcattacccttctgtatgaatatgtagttcttttccttgcttgaaaaataataaagacctcaattttttttttttcaaggaagttgtggagttagcagtaggatgtttgtcaaaacacctgaagcagccccaatggatcttaattctcctgttcttaaggcactggggtcagcttgcatagagattaagtggatgccacctgaaaaaccaaatggaatcatcatcaactactttatttacaggtaagattggctgttactattatttttagttatttaagaatgcgtactgctccaacacagcagaatcaagagcattttatatttccataagagaatgaatgggaattcatgttgtgtttttttttgttttgttttgtatgtttgtttgtttgtttgtagcacctaccagtgaggactaagactggtgctcaaacttttacaaattaaccaaggaaaaaagccataactgccatataacatttttgattgagatctgtttgaaaactgagaccttatagcccacataggcttatatttagtgatggggcagaacagtcctctaaagcaggggttcctaacccccaggccacagagtccgcggcctgttaggaaccgggccacacagcaggtgagtggctggtgagcaagcattaccaccggagcttcacctcctgtcagattagtggtggcattagatactcacaggagtccaaaccctattgtgaactgcgcatgtgggggatctaggttgtgccttccttatcagaatctaatgcctgatgatctgaggtggaataatttcatcttgaaaccgtacaccctaactgcattgccccagtgtgtagaaaaattgtcttccacaaaaccagtccctggtgccaaaaagtttggggaccactgcttaagcagctcactgaccaagaaaacatagtctttccagagaggaaaccagatacaagacaagaattctaatatttctcattaattattatgtagagattaaaaagttttttctcctcctccaaagatggtgcttttcataagcagaaaaaggggctctcctctccagttttccttctgttttaatgagcctccactccactggttagatggtgttatagcaacttgttccatcatgtgcagaatttattaagtgtacctacctaaaataaagaaaagagacaatagggaagagaggaagagaaagattgaggaaaaagagagacaaagagagattgagagagagagagagaaaataatggaagagagagatacactatgaacattttggtttgaaggatattttgctctctgatctagtcttcaccagatcaacatgaacattgctttaaattaatgtattctttaaataaataatgaatgaggaggagaaggagcaggcaaaggaagagaatgagggagagatggagggagggagagaagaagagaaaaaatagagaaagtgaggggaggtgagtagaaagtacaatgcaaagagccaagggggcaaataacctgtcaactgatggcttgctacttaagacagaaaatacaatcattggtagacatacaggacttgcagattgaaaaacccaatcccattctgaaagcaatgtatttcctttagcgtacaaagcagaacacccttcttctcagatcctcataccccgcacctcttcaacatcctttgttagtgtctctagcagcctcaggccttcccttatttggtcctatgccctggaaacttagtgaaacttacttaggctcctcttataactttagatattgaaatcctttgattcacatcagtcttcagtgatgagctaagggcttatagaaaaaaattacgaaaggagaaagtattattgcatttctggttatgtaaatgacattaccaaaaatgaacaagccaaatttcttctcagcaaacattaatttgaagaataatatttctgattcaaaaacacatgaacacgtaaaaatggttaatgtgaatttccattttacgctaagcacattagtgcaggctctaaaatgtccaccctcttgaaatagttttctttcatccacttaatgctaattgcatgagaaaagcacatcaaattcctattcagaataaagggaaatagagtatctgttatagaccaggacgtggcttcactctgttggttttgtaaataaagctcgtgattacagtgcctattccatggcagctatagagagggaaaacaggaaatataatgcagaaagcccgcttcaatgaaaaatactgtaaattgaatttgacagcatttgatggcatctgattattctaatcacagccaaacaatgatataaagagtaatatgaaacagaatgtgttactgcctagcagactcaaaagcaataaaccttcctccaatgtgacacaatcacttcacaatcataattgtagcctgtttgatacctctgagtacagcagaagggcactgactgacatagatacattttgttttttatttaaagtgaaatgaaaatggcgcactggggctccagatacaatcgttatattcacctacataggcatgaatcacttggcagttatttcaactgaagtttaaatgtgcttagacaacaacaatatcaaatttttcttagatagctgcaaaaaataatcagaaatttgtaaggacagaaatagaatggagacacatagttctttttcattctgagactacatagagccctttatatagttatagccaccagcctgcagtatttctgaggaggttatggcatgtaatttcagcttcatcattggccttctctttcttctatcggcaccaaaggaagtacatttagctcaaaccaaagataggatttggcctatgcagatatttttattaacttgcaggaagcccacttgtaaatctcatttgaaattgtttgccactctcttctcaccaagaccctgaatcattttcttttctgtaactgtcctttattttttaaatatttcctctagatattatcctattaaaaaatatctgacctaataaagacagaagatgtttatgacttcaaaaacaaagcaaaataacctaaatattatcctattaaaaagcgtctgccctattaaagatagaagaatgtttataatttcaaaaacgaaacaaaataacctagtaagaacaaactattaatatgattccctctgcttagtttatctgtttaagctattttgttgactatatataagtcacaaaaaaagatttgctacaaaaagttttgtaaagaatagagaccaacatttaagttagtgttttgcaacctgtttattgactgagtatagacaagactgtcttggacatctgcttcctcctctcaatgagtttggctggtatgataatgattcttcagtattccccctttattttatatctgcaaccttgcaaatggcaaaaatctcatcacttacgtctacaaaatccatcaaacacattaaattgagactttacaaaacatgtaataaaataatctcctcccactaggtgctttaattttaatagaaaccaaatttcatggggtttattattctcatgagctttctctttaaataaataaaaagatttgatcaatgtgcactgagaggcaaaactatatacaaacaccctgtaaatgctgtaaaaatagaaacaaatgatggcacttccttctgagtatttagtaagatttaaaggataaaatctgaaataattttgaagactgtatgatatgaaagggttttcaaagcagataagtgaaaacattttataaaatggataattaagctgattgaattaactaagaaaagacgagcattgaatcaaaggcaaaggaattttgatgtaattcaatttgtattgggtggaaagatggatatagatatgaatatttatatagatagatacagacagaagacagacagacagacatctacctatccatacatgtacatatctactgagagagacacaaagatctatgagacctaagcccttttaccaatgatcttcactacagtgggagatataagacaggctaaataaacaaagaaaagagtaaaatatatagtggaaaaacagaaatatttaccagaaaatttagagaataattctgtgtctagaatattcatggaacacttcatcaagttgatgtcattgagactaggacttataaaataaagatttaatgactatttaaattgtaagagaaatacatttgttagaaaaaatgttttaacagtacagaagattactaaggttattattcattcttatgatttactcatggcatatgtaattttcactaatagaagtaacactattaattttaatatattaacattaatgttttctatttgtattttcttcttcatgaaagaattatattgcccatattgttctgcaattttctttgggcattttatatatatgcccacacacatatacacacctaatttcttttaatgactcatcaatattctgttatatggatgtgtatcatatattatttagccagtaccctgatgatggcaagataggtgattttcaagttttcgttaccacagcaattctctaataaatattcttacggtaagtatacagagaattattcttagtactagaagtactgggtcaattaaaattgttgaggatttgtctttactagaccatatgcatttaaaattgttgaggattcctaagttgtcttccaaatatcatatgtaagaatttctaattctgaaatcttttaatacagggtcagtcttccaaatctgtcagctcaatattttcatttgcacatttttgttgttttaattcaagttttgatgattataagtaagattgttcatttacttaaaatatttatcttctatttgggaggggtatgtataatatattataaattcttagactaattttttctactggattatttcttattgtctatattctttccacattaaagaaaatctccctttcatgatcatattaaaaataacacattaattatttcttccagcacttttatggctctactccttatttctaaatatggaattaatattgttattggaaattagataagaattcattttcttaaaaaatgctaactagtttatcaacattatttcataatccactgatttgaaatgtcactcatacaaaattcctatgtgcatcgggttcattttaggactttgtattctgtttcacttgtggtaaatagggattttaacaagtacagcctgatggtgaagacatgataagtgaataaaatcaatagaataagcaaaatttccaacacataagcataggattcaaggaatggtcaggtttatctggagtcattgctattagtaggggacatttagaagatcagcttaatgatagattttagatctaaggagtttaggctttatattcagaggcaatgtgagctgctgaaggtttagggggtaaatagagaagcaatgtaataaagtggaaagagtgtggcatttgtagtcagaagatatggcttccagggcctggctctaacacttactagttatatgaccttaggcaagtcactgtgttccctaattttccatttttacatgaagtgaagatagtaaatataaaagataattagcctcttggaattctgtaagaattaaataatatgtgtggaattactgttaaatgtgaagcatgataaaaatagaaagttatcctagatatgttgtccaaagccatgttttagaaagacaaatccatctggcagttatagatgtacatttaaagtcaatgaaagaggttcatggttataaaagtagcagcttgcataacagtatgcctggtaggattctgttttcctttaaatatatagtatattttttacatatatatgtatataaaaaaatgtctggaatgttaaacaccaaaatagtgctagcagtgcttatctccaaatattaggctatcagtgattcttttaaatacttctgcttttgttcatctgtgttttcttattaatttttatagtcaatacatcatatggtctagtaaagacaaaataataaatttgtgagcccagatgcaaatctatcatcactgtctccgattttcctatttccttctttgtgtgaatatcaccatcactttctgtaataatcaaagtctgatcaagaaagaggaaccacactacttactttaacagaaggaatttaatataaataattagtaagtagttataaatttgttaactaggtaactaaaagcataaaaagagaactctaagatatcatggaggtggcaactacaggaaacagctagcacctttagaactgagggaacaaaggggagttgttagaattattaaaatgtaaatgcatagaggagggtgcctgtgaagctgggactcagacagttgaagaggggtacctgccactggtgcagttgtatggaggaggaaacatgaaattaagttggttttccaaatgtcggaaaaattgcatgctgcaatcacttgctcccaaggtatttctttattgcaacacaagaacagcctaatacagaaaactggcaccaggagtagcgtgttgctatgaagatacctgaaaatgtggaagtgactttggaaatgggtaacgggcagaggttgaaagagttgggagggctcagaagaagacaggaaggtgagggaaaatttggaacttcttagagactggttaaatggttctcaccaaaatgctgatagaaatatggacagtgaagaccagactaatgaagttggagatgcaaataattgagaactagagtaaaggtcacccttgttatgccctagcaaagaactaggttccattacatccatgccccagggatttgtgaaagtgagaacttaagagtaaaaacctagggtactggtggaagaaatttcaaagcaacaaagcagcattcaagactttgcctggctgtttctaacagcctacaatcagatatgggagcaaaggaatgactcaaagttggaacttttatgtaaaagggaagcagagagcaaaagttcagaaaatttgcagcctggccctgtggtagagagagaattcaagcagactgtggagtgaccactttcaagagagactagcatcactgtaaggtagccaagtgttaatatccaagataatagggaaaaggcctagaaggcatttcagagatcttacaggcagcccctctcaacacaagcccagaggcctaggaggaaagaatggttttgagggccaggcccagagccctgctgccctgtgcaggcttgcgaactgttccccacatcctgactactcttgctgcagctgcagctcgaagggcctcagatacatcacaggtaggtgcttcagggggcgtacaccaaacccttggtagctaccatgtagtgttaagttggcagatgcacagaatgcaagcatgaaggaggcttggcagcttccccctagatttcagagaatgtatgagaaagcctgggtgcccaggcagaaggctgccacaggggtgaagcccttacagagaaactctactagggcagtgcagaaggcaagtgtggtgttggagccaccatacagagtctccatcagggcgctgtctgttggagctgtgggaagggggccacttctctctaggtcccagaaaccatggacagcttgtatcctgaaaaaagccatagggattcaactccaatatatgagagcagccacagggtctgcactctgcaaaaccacagggttgaagctacccaaagccttaggagtcagtgcttgcagcagtgtgccctggagtgggacatggagttaatggagactattttggagctttaaggtttaatgtctgtcctaccaggtctcagacttgtgtgggccctataggccctttctgttagccaatttctcccttttgcaatgagaatgtttacccaatacctatatccacattgtatcttggaagtaaataacttgttttgattttataggcttataggtgaaaggagatgagtctccagatgagattttagacttggtacttgagacttggggcttttgagttaatgctgtaatcagttaaaacttcggggaactattgggaggacatgatttcattttgaaatgtgagaaagagatgagatttgggaggccagtggtggaataatatagtttgtatgtttgtcctctctaaatctcatgctaaaaacagattcccaatgttgcagatggggcctagtgggaggtgattgcataatggggtcagatcccttatgaatggtgtagcaccatgcccttagtgataagtgtgttcttgctcagtttgttcatgatgggagatctggttgtttaaatgtctaggactccacccgccccccgcccccccgccacctctctctcttgctcctgctctctgcacgtgatgcacttgctctttcttcaccttccatcatagttgtaagcttcctgagtctctcataagcagatgccagcatcatgctttctgtacgccctgcaggactgtgagccagttaaatccctattctgtataaattagcttacctcaagtatttttgtagcaatgcaaaaggagcctaatacaaattagaaaaaagaggtagcacatagaaggatatgataactcttatttgagagaaaagcaaggaaaagactttctggaaaaagtgatatggggctagaattttaaaagacgagttgtagttagtctatagaaaaaaggagaggccaggtgtggtggctcacacctgtaatcccagcactttgggaggctgaagagggcagatcacaaggtcaggagatcgagaccatcctggctaacacagtgaaaccccgtctctattaaaaatacaaaaaattagccaggcatggtggcaggcacctgtagtcccagccactcgggaggctgaggcaggagaatggcgtgaacctgggaggcggagcttgcagtgagccgagattgccccactgcactccagcctgggcaacagagcaaaaaaaaaaaaaaaaaaaaaaaaaaaagaaagaaaaaaggagaataagaaagaggattgggagggatattgccagagaattagcagataccaaagccatggaaccgtgaaatataatggaatataagaaactatagtcaagcatttgatgataactagaatataaaatgggactagaaatttcagaaaggtgagtccttttgagaatcagcagattaaggataagcataggccattttacatggtaaatctctaaagaatttttaaaaggactgtcttaaaatttttgaaaggtttgtgatgtctcttccctcaacagccaagtctctactcacaccaaaaacttgacgattcaaccttcacaaatcattttgtaaatcacctgtgtttccatttgtcctctcagcaatctagttcagggtctgcatttattcttacgtaaactgttgagatgacctccttgttcaatgccagatgcacatcatctccatgataacttcattcagatcatgcattacattttacccaatgatttttatgttttaatttttataagaattttcagaggtttgttatactctatgaggttattaactccactttacaaaatgaaatagaaactagaggacacagacaggcaagttcacccaaggtcattgaactaagtggcagagccaggacctccaacctatctcctctgactacagatgtttctgattatctatttaaactcagaatatttgtaatattcttcatggaatggggttggcagtttcataacctcaaaattgttatggtgcattgggttctaggattttgttttaattgcttttgaaaataagcagtgacaattgctggaggggagagaaggagtaaggagctcctaaaagcattgtacattgagaccacagaagtgtgactgcctttaaaaatatatggttcctagtttttatacttatttttgttttcctcttagtgttaggcaacattaaattaactctagttggaaaattacattcctgaagtatctcccaaatgagcctgagcaaagaataaccatttggctattcagagagaactgaaaatgtgatttctctaaacacaggctactcaggaggaaacacttccagttaaatgaacaggtgatgcttaaatcttaaataattaggaataattgtggtctactcaaccacttctgctctaaatgtattcagacataaagagagactctgttttttagcagtgcagatgggacatgtacttctccacgatattaatttttcaaggattcaatagcgataagaaatacttaaccaggctgcaccttttaattcttttggtgaataaacttgaggccaacataatactcaatcttttaaatagtatatgtatttaaaaccccacttttaggcaaattttgttaagaatgtcggctttatagaaaccatgactacatctcaatttgggaattcgtgagagtttaataaaaattaattgaattgtcatggaaaggctgaagctagacaaaatagaaaatgttacttccccatagaccatcataggtttgtttgctgtattgtgttcctagcaaacaactttttaaaaatcactgagaagagtccttggctatgagccctgcagttctcattagaatggatctctcccaatgacacacctggtacctgatatctgtagcaagtacaaaggccaaaccctgcaaaccttcactgagtgcagaatctggttcacgcatggtagtgagcaataatgaggtgggctgccgaaccataattgcaggtgactgagaggtgtctatgaagcctctatagcttccagcatgaagcttgtcattgctcatacttaggtcatcgtgatttatcaacttaaggatcatcagattcccaaagccaaagattttacatattctgcctttttgtgaaaggtaactgtcattcactttgtcttaataaccctttacattttgatggagctggttaatctgatatggcagcatgtgaatttttcagcatctgaagagtgtgttaattaaatacttctaacagcctggaaaatattactgtattcatcactctcttctcaactagagagagagctgaaagaggagggtcaatgtcttggttacattctctcccaacctggaatactgccctgataggaaataagagctgatggagaagaggcaaagatgcagggaagtaatgggattccataacttttagcctttcacttgaaaaacatgattgaacacttactgggctcagatgctgggaatatagagatatgccaaccacagttcctccagaactttgctttccatcaaacctgcatcatgtttttacatctggatgagaaaagaactgttccaaatgaagtatcagatatatagggccgtctcaacaactcaccattccatttctcttacttctatatttaatgctatatatatttagtaccaaaagagtatgcatttggccctagtttccctatcaacaaaatctaaagatgagcctaaacaattccatcctcagacagttgaaagaattttggggtcatactctgcattttaccaggttttggggaagacatctaaaaggaatttgacttttgtcctttaaaaatctctaaagcaagccagacatggtggctcatgcctgtaatcccagcactttggaaggccaaggccagaggcttgcttggggaagaccagcctgggcaacatggcaagacctcatctctacaaaaaaattttaaaagttagccaggcctagtagcacacatctgtagtcctagctactcaggagactgaggcaggaggatttcttgagtccaggagtttgaggctgcagttagccatgattgcatcaatgcactccagcctgagtgacagagtgagacccagtctcaaaataaataaataaaacaaaaaaactctaaaacaaattcctattatattacttatcatgttattttcattaatctgcacatagctccatcttctctactcagctacctattcctttaggtaaggggtgtgttcatctttttacccttgtttctaatacaatgatgggcatataacagtgcttaataaagttgttgatgtataagtacaataaatgtagaaaaaacagtggtcttgatgtataagaaaagattgtccatactttgagaggttatggtttaaattatagaagagaaaattcaaatgaagagaaattaagtggcatctaagaagtgaatttaaaatactttgtaaacatcctgggaacaattgcaaaagagcattgtgctgcatgagagaaaataggaactgtggacttcccttcatagttcttcatcatccagtatgccaacctgggctttttcacacagtaattttatggtcctaagagcagcaaaaggatcatcctcaatgtgcaaacacttttgaagtctctgcaatcatcatatttgctactgtcccatgagccaaaaaagtcatatagccaagctcagagtgagtttacgagcatactcgcaaaaggcctggatacaggaagacaaacacattgggaccctagctgcaatccatttatcatagaagggtaaggattcccaataatagcttctactaattccatatcctgtggttccagttgtacaaaaaataaaaccccgatataactgcatgcatacatgcacacacacacagacacatacacacagatctggaaaatatataaaaatgcattaataatgtttaatatatgcttctgtatttttaaaagattttaaatatgtttgttttcttgtattgcatatgtatcttgttattcagcaaaaacatctggaagataataaaatgtgattttggatgaggtttcaccttttgtgctttttatatttcttctgtgttttccatgttttctacaaagcatatgcactcttttataatcagtcaaatacgtgtgtgtgtgtgtgtgtgtgtgtcaactacactttaaaaatgatatggagttaggccactggagtacttctccatctggtttttctttactatgacaccaggaagaaacagctgaaaagttaagttgataacaaattctaaaaaaaatgtttttactccatctacaaactttgttttgaagtgtgcagctgtcactggttgcctgcttggtttcctttcagacgccctgctggcattgaagaggagtctgttttatttgtctggtcagaaggagcccttgaatttatggatgaaggagacaccctgaggcctttcacactctacgaatatcgggtcagagcctgtaactccaagggttcagtggagagtctgtggtcattaacacaaactctggaagctccacctcaagattttccagctccttgggctcaagccacgagtgctcattcagttctgttgaattggacaaagccagaatctcccaatggcattatctcccattaccgtgtggtctaccaggagagacccgacgatcctacatttaacagccctaccgtgcatgctttcacagtgaaggtaagaccctttagaaaagtaacagacatgcagattatctggtgaatacgttgaaattaattttcttgtccaacttctcatttttcttcacttagggcttaaatatatgaaaatctttcacttgtgaaaagttgcaatgtagtcacggggataagatactgaactgagtatgaggagtattggagaccagtttgtagaccacgactaattttgattacctcaaaaccaataaataaattttatttattcataaaattgcctgatttccattttccatatttactaagtgggaatattttttttttgagacaggctctcattctgtcacccaaactggagtggagtggcgtggtctcagctcaccacagcttctgcctcctaggtttaagcaattctcctgcctcagcctcctgagtagctgggattacaggtgcccaccactgcccaactaatttttgtatttttaatagagaggggttttcaccatgttggccaggctagtctcgaactcctgacctcaagtgatctgcctgcctcagcctcccaaagttctgggattacaggcgtaagccactgcgcctggcctaaatggaaataatttagtcttgatttccattttccatgtctactaaatgggaataatgtaatgctttcctccatacctcatagagatgaggttcagatgaaattagacagaatatttaattttctacttccccaacaagctagtataatatatagctatatatatatgtatatgtatatatgtatgtgtatacatgtttgtgtatatatgtatttgtatatatgtgtgtatgtatgtgtgtgtatatatgtatttatgtatatatttaaatatacacacacacacatacacaaagttgcatacactatggcttactggtgatttttttcagggatggcttcctctggcccatagaacgacttaattcagttcacctgagcacttagtagctcctgagtgctttctttatgtccagcataacctcatggtctatggaatatacagaaacaggatggtccttgtcacagggagtgttccgttttataatattgcagagatgagaattgcacataaggggaaaagaatgagaagcagttgagtacagcctataatgtccactacactgagacttagatcccgaactccactatctactagctttaaaccacagtacaagagagagtaacatcatataccaagtgttaggcaagaaatgctctgggagatcaactctcaaactgaagatgcttcatggataagattaaattttgtggtcttgggagtgaaatacaaatatgtgccaagaccttattaaatatggaaaaccctcaataagaacaaataaacagacaaactaaagcatttataaaaaaaccaaaaaactatgtttctatgctttaaatcctggaaggccaatttacatgaaggttatcttatggaggataacatttatcaaaatatttaaattacagtgagcaaatatattttcattaaactccagaagagcccttttaaattaatagtttaaagtacaatgttttcccactgtcctcatgtttaattttctcatatgactaaaaaataagcaatatgtaaatgaaaggataattgttttatcttcatttttatctgtttcagaattagtactatatttttattagatagtaaattatgtactagagtcttttatattatgtcttctagttcctatatgataagcattagaagcagtgttcttaagtgtaaaagatactttttagtggatatgtgatccaggaggaagttcgttacttcccaccatatccttcaaactcatgttctaaactttcacccttaaagtaaaacgtttatgagtatactgaaacacccttgttaatagctttctgaatgaggcaccttaatttaaatatgtttttattgaaggcatcaggattataatgattaaacctctgatcttttaaaatacaactttcaggggtaggagcctaataatcatttagtctcacgaaacagttctattggaattcccttgtggaataaccctgtaagtcatcccttcataaccagcttcattttaaaacacaagatttaaagtatatgatgaatccatgaactctgttctttatttaatcttctaggctctatttttatcacactaaaaagcttctgaaaagaggcaagtgtatggccccaagctttaagcggcacagggctctttgcacatgggccctccctgatgtggctttcattttgacagtccagtactggtgtgcttttctatttttccaaagattttttttcttgcaatgtcgaatagattagccagaataattttaaaaacaatacttctgtgtcctatttttgaatgtgtatgtgtgtattcaaagtggcctcccaaaacctaaatctttggctcttagaatttcaagagaaggcttcattagatacaccaagaaaggtcccacctgatcttttcaagcaaacaaggacatcttccacaaagcaatctaggcaagtgttcagaccttctggccactggaccacgttttcagggcatcagggcaactatgactctttatgatctgacacctttgaaggaagtcatcaggaaaatgaactagtgtttttgtgtttcacttattcccacagtccctgtgtaggagattgtgttcaatatttttgtttaaaagatatctaggccagacgcagtggctcatgcctgtgatcccagcactttgggaagctgaggcgggcagatcacaaggtcaggagttccagaccagcctggccaacatggtgaaaccttgtctgtactaaaaacactatttttagtatttttactatttgagaggctgaggcaggagaattgcttgaacccaggaggccacggttgcagtgagccaagatcatgccaccacactccaacctgggcaacagagcaagactccgtctcaaaaaaaagtaaaggaagttctattacttatccagggttctatactcctcaccgtcacagaagaatgtttcttttatctcagacaaatcctgcctcctataatttaagtctatctccctttgttcagagcagcatgacttctccataatagcacaaaggggcttcagggtccaacaaattattgacaattcaatctgatttggcaaataaccattgagtactatattcaatatgtcaatattgaataccaaacttaactatgttgttgaagtctactgtgagacttggcccttgagcagagcagagactgtgaggaagaatgagtgattcgttctgaggcacaggctattactgttgggcattttgggtttttaagcttcttgcagctgcgtttctgctgcccatgtttagaagaccccatttcatttttatttttgtataaacttaatgggtccaagtgaagttttgttacctggatatattgtgaagcagtgaaatctgggcttttagtgtaaccgtcgcacaaataatgtacatcgtacccatcaggtcatttctcatccctcaccctgctccctccctccctcccacccttccgagtctccagtgtctattattccacaccctatgtccacatgtatatattatgtagtcctacttataagtgagaacgtgcggtatttgactgtctgtgtctgagttacttcatgaggataatggcctctagttccatccatgttgctgcaaaagacatgatttcattcttttttatggctgagtagtattctacagtgtgtgtgtttgtgtgtgtgtgtgtgtgtgtgtgtgtgtttcacattctatatatatccatatatataattacattctatggtgtgtaaaattattcctatttagtaaatatggaaagtggaaatggaaatcaggagatatatagatatagatatagatgatatagatatagatatagatatagatatcacattctgtttatgcaatcatccattgatgaacacttaggttgattcaatatctttgctattgtgaatagtgccgtaatacacatacgaatgcaggtatcttttttaatataatgatttattttcctttgggtagatgcccagtagtgagactgctggattgaacggtaattctacttttagttctttgagaaatctctatattgttgtatattgagaaatctctataggggttgtagaagactccattttaaatcgcatcccaagtacttccctagatctacttactgtttatctaatttctgcaccaggtaaacaactttactgtcttctttcctttctgtgcctgctgtaggaaatttttcaagtttttgtttattggccactctggctaaaattcttcagggcaaaggaactacagaaccttctccattaatgaggcacagagtccatccccacaactgtaggattgcagttcagtccacaaactcgcaagaggtactgctaatgcattagtcccttgtttattaagatctcatctctgcccaaggggccatcaataaattgcccatgttgtggtgccatcactagcttgccccaaggtccccccagagttgtttatagacaggtggatgttgctgagagagccacataaaacaggtgcaatggaggcatgaattctgcttgtggtggcagtggatggagaactggcagtgggggccctccgtgggggtgagaagcgtatgtgttggcaggaacagcagcagcggcagcagcagcagaggcagcaggagcagagaaatggaaagagtgtgggttttaatgcatcactagctgctctcccaacctcatgaaaagtttcacctccctactcatctctatgtaggtctttctaaggaagaaagagggagatcaagattcttggggtctctttagaccaataccttccattattgaaaacagctttaattagaaggccttaaactcccttcccaattagctctgtgatgaattgtgcggtgtcaggaaagaaactgtatttagccttgcttggcatgcaggagttccatggtggtatttacagggaacactcctggcaaggttggcgatattgctaccaccatttgggtttgtttgctttttctcactggcatctgccattgtgctggcagaaataaatctgataatttgggattttaaagaaaaaggtggtttacctattatctgtgccctaactatatccttgcttgttccacggggttataaaacgtcaagcccagatcatgcatttgcccagtatcctaaaagataaatggtacttcactctgtgtagaatcaagcataaggtgctgagaaataagcaaattatatgggtcactaaaaattggcttccaatctgggaataaaatccagaattactaactctagtttctagattctagttgccaggcttcctttcccaatgtcaaggaggaggtagtcaaaatttcctcaagggtttgtttcctatatctttaccattaagtagatatgtggcaaaaataataacaataataataaaatagatatttcacaattgccatgttatgaagagtgtgtgagtaaattgataaatttatttttaatcccattttcattttggcttagataacataaaatattactgctctttacatatgatcttaaattagtttcaactctttttaatttgatgattcttagccttttctccccagacacatttattagacaacagaaatactctgggagatgtagctttctaaaaggactcctttggtgactatctttctaatgtgaagaaaaattcagtaataaaaataattatcatatttcctgggtcggttctataaactgagattttcacattttataataagaaataactgtgtcattcttctatataaaagatagaaaacatgggtgagtaaatatcacacaaaacaatgaatatttgtcggcctaaccctttttttttttttttttaaagagacagggtcttgctctgtcacacaggctgcagtgcagtggcaccatcatagctcactgcagccttgatgtcctgcactgaagtgatcctccctcctcagcctcccaagtagctgggactataggtgcatgccaccatgcccagctaattttttaaattttttgtagagattgtgtctcactaaattgccccagctggtctcaaattcccggcctcaagagatcctcccgctgcggcgtcccaaagtgttggaattacaggcttgagccactgaccatggcaaaactttttagttgtgatgatattttagctttaatatcaacttttcatttacttgccttacataatctttaacccttttgtctaatttgggctagacaaattagactttcagacaaatatgtatttgtctgaaagtcataaatacatataaagaatctaccttttgctcaacattattggggatgaaaaccatgtaagtcttttgaaatttatgtaattacatctttgaaagagccatatttttctccaaccactttatcccagcaagctccatcaggattcccttgctcacccatcagtaacatctaaggcaggtcccatgattttccagtcacttttcagtggcaaggatcaacgcaactggtgattaagactcattccaagtgttttttaaaaacttcagtctagactgggggcgatggctcatgcctgtaatctcagcactttgggaggccgaggtgggtggattacctgaggtcaggcgttcgagaccagcctggccaacgtggtgaaatcctgtctctagtaaaaatacaaaaattagccaagcatggtggctggtgcctgtaattccagccactctggaggctgaggcaggggaatttcttggacccgggaggtggaggctgcagagagccgagattgcaccattgcattccagcctgggtgacagggcaagaacctgtctcaaaaaacaacaacaacaacaacaaaaactccagtctaaattaaaacctgatatgtgcttaaggatctgcagtggggaaagagggcatggtcattttcctctttcttcagttccctcttctcttatttatttccccaggatcatggcatgaaaagaaagaattagacaaaaaggaacagagctttactcaataatattgctctaattaatcttctattaattttgagggggcagatgcctcatgggattttctctgtgggttatataggggtccccataggaaattccatgcctcatagtcctctgatgcaggcaatacactctctggctaatttcttactatttgttattgtccaagaggtccaccctacaacctttttttgcctctgggggcccttctcccaagcaggcagccaatatcaagtcctatcacgttgacaaaactcattcctttcttggcacccactaggattgcagaaaactttggtttcaccaaataatgaaggtacagcttgtccagtactatattctctgcttgacctatcatgctggatgaaacctagccagtctcctaactttggaattcattgactaagacacaggtattagcttctgtgctagcctattatcccaaaactatgggatcacttaaggatttcagaagacccttttgactctagtcattgcatcaaaattgtcctatgaatttcatcagtgcagtaggaagcctcttgccaagaccagactgttcatctcacttttctggcaacactcccaatttcttcaagagcttctcttggatattccttgcatgccttgaaaggggagtgtggagaaatcccattccctccctgaagtgggaaagatataaccaaagcctctttcttctccactgaatccccttctttaattttttttatgaacttggatcttctcatataggttgtctacatagatcttcataggaagatggatcttgaagtctgttttttccataagtcatgcagtgatatgtctagctgttccagtagagttacttaccacctatttttctaaatcatactcattattctccaatacagttctgtttcacatcctattatataactaaatggccctatcatctttctagttgcacaagccagatcatttttgagtcctctctcttccttacttccatatcaattcttcactaagtgctattgattctatttccaaaccatatcttaaatccttccacttgaagacaacattaggatcttcacacatgttaatccctcctcctggaatgatggctcattctcctataattcatctgtcctcattcttactcatcaagtctgaactaaaatgttgcttatctcatagggctgctgcaatgactaataaattaatgtatatgcaaagtactgtaaagggcaatataaatagactataaacctttagcagtccttctttttgaaaaaacagagactggaataaattagcaaatgtagataaggttctggtttgtctaggcaactgtactaatttggtcatgagtgaaaaaccttatgttttatacattttaagtgttcctcaccttgcaataaaattctgagcttgcaaatttacatgtttcctgataccacattgttaatttccctgtaattttccaaatactggattaggttctatttcctttctaaactgcctgaagcaagaacatgctttttttttttttttttttttgtctcctgaggtttattacggtcttatccctggcccccctgccccaacaacatcacatacctgccagtctaagagccctcctcaggagatttccaccctatatgtagttctctttacctgacatgacactcttaggaccctaccctttcccttagatctgggattatatcagcagaacatgatgaggtattttagtcacacacacacacagacacacactctcacacttctcaaatcatacaaatggattctgccaaattggcatctacctacttcccctatgccaaatagtagtttatcagtacatgagggacagttagttggtggggagactgtttgacctgtgagtcaagtatgttgctattttctggcctttaaccaacttacaaggaaaccctctttagacacctaagactcccgtggagccttgtcaaaaatgtctgtgaaagtaaaatgaactagtccacatactaacaggcccaggccataaattcagaatatatgccatttagcagagacagcaagctgtaaatggcagtgaagggcagaagttaattgaactactctgctcttgtcacagatggaaagtagccactacctgagacaagatggctgccccgaagtaccctattacagccaagagatcatatccttagctctgcaagggcttatgggtgagggggaaatcatacacagatgaccaatttttttatggttcacagccgataaaagtgaaattcagcagctgttcaggacaagtgaccactgtaacagctgtaatataacctactaaatagagagggaattgcattagagcaagaggttagctgtgatcatcggcaggtgagtgctttattgaagttgaaagaccattaacattgatagagtaattatttcaacttgaaagtaattaccttgatgggtgataacttctctagtgttcccagatttgattgggccaaacaattgtgagctcctgaagcctagaaaaatattacaacaatactgtgatttttaaattactgaaaccactgttggaatattctaattatgccgaacagtgaaaagattttgccttacacaagctagtgacctctcatgtagagagagacatttgctttttaatccaaatgcaatgacccacacccaccacctgtgaatacatatgtgatgggtttgcaaatgaatctttttatctcaatataatttttaaggtgaaacatcttgttagtgctgtgcctgggtaatagtaagctagaactgctgacatttttgatcatatctatggacttgaagtctccagaatggcaactatcttctatctttgtcacagagggtttaaatttgtataaattaaatattttgataatgactacacataaattagaatttctggatgccacgtactttggatcccaaatttcagatattatctagttacataatcagttgtttaaataactttctcgcctgatgttatgcaactccactacaaacactccattgtcagggtattttccgtttacctacactggacatcagcaaacaaaattaaagttgaaaacctgggctattgcttctctgtagtctcatgaatatatgaaaattgcaagttatttgcaattgagggccaagacacatcaaatctaattcagtgatcaagaccaagaaatacagggctcttccattaatcagtttttcaccatatttctcttttgagaatctacttggtccagaagctataacagatacaaacaaacgagaaatagtcttttctctctgaaactcgtcgtgtatttggagaaacaataagaaaagagacaaaatacaatgtaataagcaatcattttgtcatgcatggtattgattgtacttataaatagttacaagaacctaggaagactctagcccatactcctgaatccaaacccagcactcattctatggaaccacaaaccattgacagaaaaaacacaggcatcatgattcttagtcatgttgtcagaaaagatgaatgtgacatcaccttaaagttcctggatgattccgtagacctttctatcatcttggcagggtttgatcagatgatcagccaatgaatgactatctttttggcggcacttcccaggagttttttctaatcaaaatctcagactctcctagggacaaaacaggtttctacttgttgtctaagagccaataaggaatgttttaccaagcagttaatgggtttctttcatctctccatctcggctctgaattcccctccatagacaaagtctttgggtctctgtttcagaaattaccgtagggtagaaatctctgccaagccagaagacatttgcccactggaaagtaatgtaactggcttgaatttggtaaaagagtgaaggtttgagacaaaaacataccacttgggaaagtgataaaaatttatgaattgaattgtaaatcttgccattaagccaaccaaagagtaacaaaatctgaccaatctgacagcacatcagagttcttagcacagcaggctcaccatgtgtcatatacagccaggctaaagattgtattaaggacccccttaggtactctgaatttaaaataagtgtaataactcatttttaaacattttatatgatacttgaattattaaatattcacattacaaaatcagagaattttaatccattcaaaagggtgggttgtctaacactgaaagataatggtcatgtctagatagtaaaattacagtatatttttaacggatgtacatgttactttttgacaagacacaagtagtgaattttatcgtacaaattcctattgggtgattatgatacagagttttatttttgctaaagcaattactaatgtcatggctggatacctgtgcccattagtggctggttctgtgtttttttaggatggttattgatctcttgctgagctgagattcaggttttatgccagatagcttgattaatgggttggtttctataagtggactgaatggggatagaaagcaggggcagcctgctctgccaaccccaaatccgtcaagacgcatagctcattatgaaacagttatcaaggatacatgaaaaattaattgggctcagtttgattctgaaaagaatcggctttctacttggcgggcccccccgccccccttccactctttccagatgttctgcaccagcccctagagaaacagcaaagggagacgtattaatacattgtattgattagatcaagacccctgacagttatttgtagagataccatctggctgctgttcgaattccttcaccaaaaacaggacgtgacatgttattaatctcaactctctaagtatagacagttgccttttctgctaaaccgcattttaccattccgtaggagatggaggaagacctgaagggtgcagaaattaaggttattacacaaattgagccatatggtccaaatatttcagcaagaaaattgccaggcaataaaaattgctcctgccttcctaatggtgtaaattacagtttaaccatggctctaatgatgtccttctgccgcgcttaactactgttacatgaaggacattgttttaaaaatataaaaaacaagtaaatgccagcagcgtgttttacaatctgttagtgtgtcattaagaacactgtcagaattacataaacataatggcaggcaacccagcatacaaaggaactcgtatggaaatagaaagtgtcttgaaaactctcttcattatctctgaaatgtcaagagcactgtcccctctggaagttttctagggagaaaagacctgtccatctagtgctttattctaattctcatgtgtgtcccaacagcagtgttttctaaatcaagtgtcacaacccatagtgagactaagtacacatctggtaccacaaccctgtccatatacaaaaaatgaagcagacaaggtgaggagacagctaatgaattctaaacaaaatgatagacgttgaccttttgaagtatttttgtttttggggaaaacagttaagactccactatcttccttgatgatgacatcaacaattaaaagtataatttctatcctcagcaaactaacctggcaacagaaaaccaaataccacatgttctcacttgtaagtgggagctgaacaatgagaacacatggacacagggaggggaacaacccacactggggcctattaggggggtgaggggaggaagagcatcaggataagtagctaatgcatgtggggcttaatacctaggtgatgggttaataggtgcagcaaaccaccatggcacacgtttacctatgtaacaaacctgcacatcctgcacgtgtatcccggaactttaaattaaattttaaaagtataatttctgtcatccctatttggggcatgatattaagaggaagcttacttaagataatcaaaaatctttgggaattacaataaagaccattaatatttgagtaagacttgaacccttcaaatatttttagacctattacaccaaaaacacctcggcacttaaaaattccatataggtcatattgatgttttattctctaaaactgcacaatcctccaagctttttggtcttctaagatgttataaacacagtttgttaaaggaaaagtccagataaacgtttgtagaaaaatttgaagggaaaactacttttaattcccagaggagagttgccttatctttaagccctttttccttctccatttccccaaagggagaaagaccaggatataaattgccctttaaactaaaaaagaaaaaagagagggaaaaaacctaggaaaccaaaaaattattctttttgcatgcatgcattaatattaatgagaacccattaagttattatttcctcatggcacaaatggcaaggctagcaatctattgactagagcatcttctgcctggaaagctcttacccaggtgtccccatggttggctcccacactttcttctggtcttaagtgaaaagttactaccactaaagccttacctggcctactcagctacaatttcactccactctccctcacacacactttctattcctcttctgtctttatttttctctttaatatttagcttttatttctggtttcttgctaacctgtaatcatatttcagaaattgtttttcaaatgctttgttatgcttcttatttcacctaaaaggaaatctgtatgttcacagctaaatcaaactgagaaagcatcatttatatgttccaatttcaatttataagctgacaacttccacataaaacatattatgggcactttacacatgccatcttatttcacctcaataaccaatctgtggagtattattacctaaatttattaatgaggaaatggaaactcagagaggttaagtagcatacccaaggtcacacagctagctgcagagtttggatttgattgcagctctctcagcttctaaagccttttctttctgttatccagtattgcttcttgagtttcagcctagtggaacaagatgttatttatgaaaagctaaacatcaatgaaagccacaaattatagttcaataggacaaagagatgacacagagcttgatatgattcattgcctagtataaatatagaaaacaattgataaaagtttcaaagaattaaaagatcacttggactggaaaagttcagagaaggcttttgggagaggtctgtgctttgaacaatgggtgaaattcaaatagaagaaaagtagaacagatattaccttattcaggcaaagaaacagaagcctggttttgaaacatctgatggcaagtctctgcttcaggaggtcacatggggaatatttttccaatatgcccccattaattgggctgatattaaaacaactgatttaaaaaaaaaatcaaaatactcccaagagatgcctagcaaagctattgagtgaggtggttagcagcatgggtctggggtcaggaaacatagattagagactggctttggcttttttactcattgtatgccttcaggaggttatgcctaatagtgcctcccgcagagaggcagcacctcttagagtcgcaggaactgagacggcactcagtaaatagtggtgagtaagattcaaaataggttttcagagaagaaatcagcacatgaagatatcatggtgtcatagtgtgttgacagggtcctgtctggagatactagtccagaatttcaaaaaaaggaaaagttttcttctggccgggcgctgtggctcatgcctgtaatcccagcactttgggaagccgaggtgggcagatcacctgaggtcgggagtttgagatcagcctggccaacatggcaaaaccccatctctactaaaaatacacaaattagccgggcatggtggtgggcacctgtaatcccagcaacttgggaggctgaggcagggagaattgcttgaacccaggaggtggaggttgcagtgagccgagatctgccactgcactccagcctgggtgacagagcaagactccaaaaaaaaataaaagaaagaacaaaagaaaagaaagacaggaaggaaggaaggaaaatttattatattttcttgtttcccctgcattccctaatacccctttcccaaaagtatggatttcttcactaaatatgttagtagcagaatggtcttgtggcagttgacccaagactccaggtagagcagtggggaaagaaaagacaaggccagccaagaggccagccaagaggacaagctcctccaaaggttgacttgagatattaaactcattgaaaaagttactcaacatccacagtgttctggtggtacctcacttagtcctggacaatgaatcacagcccaagcttcatcattgaattggtgacactgccgagggccaactcaccagccttcaaaaacgacagtgctgctgacagcaaaggcgatgaggacacacatgtgcatccacccttgagatgctaaaagaggcaggaaagaacttgagggaaagaacaaatcactcttctgagattgtcctataaactttataccaggacctatgctatcatcctccttacctaatcatgtttaatatctgatttataagaatctaaatgtgtacctaaaagtagctttctaaatattactgggccacattaaactgtgaccaattttcttccttcctggcctaccacattttagaaatatgatagcatatttgggttgggagtcgctaaaggcctcaagagagtccatctctttgtcctttctgactaggaagacctggtcatcacgccacaagccttggtgtctcgtttttaacagagcaataattatttattagtggaatatatgcttattatatccagaaattaaagttgttaggggacatttgtgtatccaggtccctgtggctgggtgatcgcatctgttagaaataaatcactttaagaaaattatattagccccacagacagtcaagaatggagcaaagggagggaagtgtgaatagggtgaggaagcttgattttaaatcttgtgaaatagagtgtggtcaatatgttgtcagcacattacagtgtgcagacatcaactccatttttcccctctttgaacctcaggtggccaattaacagtatatgctatttattcattacaaaacaggcaggacaaattgaatggttagaatgactaataagaattcttagcaaggagtaaaataaaaaatgatacataaggagagaccccccagaaaaactttagggatttccagaaaaaaaagtcttgaggagttttcctgttaaatgtatctagaatttctactgacatgaggaaattaaaatggaaagattctctttgaatacattttcttcctaaaatatgttctcttcaattccctcatttgtatttccttagagtttcattccttcctaaagcagaaagacagttttaaattacttctagcaattataagtatcattagggtgttttgatgctgcatttttacaacaagcactgtgcttgccttccttatttgtctctcagttcaactccaagtcgcaacacaggaaatgaaaaccttgtaaattgacttgatcttatgaatactcacttttgcaaatatgaaagaacttaagaagggattataaaatactccttatctatataattaaaattcagttgaaatatatgaattcaatattttaattcatgcatttcattttgcgggcattcaaagattatatgcttctatatgtctgccattgatttctgtaaataacattatctctcttattgcaaaacgtacatcagaagaagttggaagaaagcgagggcttgagggatgttaaactgaagcagcagtgacttactatgcagtgttagtagattgcttgccttgaggatctagaagccgatagaagaaatggagccagcaaataagaaatttcttatttcttattccagaaataagaaattctgaacttttaccttcaaagatccaaaaagaacatgctaatgttcttttttttctaacttttgagtaatttagtcattctcgttcagaaaattaagggtctacatctggcagcaactgaaataaatggctcaattgagtacacacttgaatgtcaaatatatcactttaaaagtcaatatttgtttcagctgtaaatgtttctgaacggaaatgatgcttttagtgtctgtagtctaaggagtagttttatttttgaaccctcaaattgagtgctccacctagagccgtaggaccctttcctttccatgaggagagcgccctctactgggtatgtttacttaccacgcatgactgttaagaccctgagctaaacgtatgagcagttgagatgtacataagaaagagtttttggaaaatctttgcccctgcttgtactagaatgattgcaagtgtggaagtagccatagttcactgtagttttctttttactgctgtattattgcaccctgttgggggatacatctgagcatttcatgtgtcctacttttaaaatgcccagatggtggctacgtgctttggtttgaattgggcagccctcatctttcatgctctgtagtctgcctcgttatcagagagacatgagacaaggaaaattcttccatttttcagctcctcttcatctgtttctagtcacccacagtgaatgatgcacttgcacaattgttaaaatgacagtcactgtgataactgaacatcacttccctgggatggggagttccctatgtacccatagcttcttgattccttcccaatacagcacctttttcagtgtaactgatcacttgcaatcttgtaagtaacacagcagtgagaggcagtgtaaatattttataccttgccccaatcacttgtatgtgcatcggtcttcttcactctagcctttaagcttaacagagattttaaatcaaatcattcaaccctagaaatagtcaaaagaattaataaaataaatgaaacagtgtaactggttaaaatagccccagtgcacaatacaggtttagtatgattttgtgacatacacattttatagggcttttgtctccaactacattcttcaaagagccatctgggcaatgaccataggtatcatttttaccaataatagtcagcacttcccactgggaaattagtcaagggaatgagtttttttttttttttttttttttttacaaattatcttcaagcatctatcttccaaaaagtattactggactttgtccattacaaggcaacaacctaagtgagttacttgtgctcttattttagaactttattcatcagatcattgtgatcaaactcaatttcattttcaaagaggaaaaagattttgctctgtttttcttcttaataataggtttgctgaaggaagaacattaatacaggtcagcgatctccaaactttttagaatattcacttgtagaaataataatttggggagcacacatctgcataatatgtatatttacttatttgtaaattataaaatatgtactagttaaatagtatcatttacactatagaaatagacatttttaaaggagtggaaatagataaaattatcaagaaaatattttattatgagcaactactatcaataatacctcaaggcacaatacacactgaaagattaatcattaatgatgctgaatgtcaatctctttcctgagtgttcttgatcatttcaaaattttgttgacacttctgatcaaatacaattggaccattcatgtttatacctcatgctgtggttgataaggagcttgaaggaaggagaatcagactggccatttatttgttcttcatttatgtttgtattgttagtgttatatttgaatcataaatttgaattctaggaattttgaaagccattcatgtttccaaagttagtatacttaaaaccagataatataatccataaacccccttagcatagaaccataaactacaatatgtcacttgacacaaggggtccagaaccccggggacgcagaccagtactggtctgtggcctgttgggaaccaagccacacagcaggaggtaagtggagggtgagcctcaccacctgagctccacctcttgctgtgctccacctgaggagtggagcacagatctgctccacagatcagctgtggcaattgcttctcacatagcaaaccctattatgaactgcgcacgcaagggatctaagttgtgtgctccttatgagaatctaactaatacctgatgatctgaggtggaacagtttcatcctaaaaccatccccacctcccccttccatggaaaaattgtcttccatgaaacggatccctggtgcccaaaaggttggggatcactgctttgcactaaaagcaaacaaatagatgaatattgttagctcctcgctgtaaaactcccattcttccttttccaaggacagatacagaacttaattgattcattcattcactcatccagtcagtatgtgtatgcatctaatatatgccaactgggtatatgacagtgaataaaccagacaaaaatgcttccctcttgaagctcttactctagtggggagataaagacaataaacaagataaggaaataaaatatatacataccatacataagctaagggcaatggaggaaaataaagcagattccagagtctccattataaaaaatacaacttttgcaaattggtctttagttcttattgagtttaaaaggatgtttcccttccacatccttcttcccactgtcttctgggatttttgcttcagatatgatggtcaaattgcttattataaattcccttctaagattctatgagttttaaatttgttttaattgttcacatgttgcattgaatgatgcaattgtactcttctagcacacagagctagtaaatttcctatatattgatatttaaagcctgtccttttatggagtattttgtgaccacctaaacccatgatgatttcttgtgtatacaccttcagtgcttggttcccatgtatttctctagtggtttcagaaaggtgagttttacattcctaatggattacagttcctaaaatccagtatgttcatactttctacttttattcctttccatttagtgcctagaaccatgccagaaaaagacataatttgactgtggatttaaccctcagatcacaaaccaatctcagagctttatttttttgctgagagttttaaataaactataaagtcaaatttaaacaattatcctttggaatcaacagaaccccacatttccttagctttccttagctgttcctattcccaaggatcacattcagagcactcttcttgagtgacagtgatgtgccaggtacttcacagaggtcatctgttttaattgtcacaaaagcccaagagaaagatactaactgttagaaatctagctcagaaaaagtagatgatttacctaaggtacatctagtgtgagtgacaatcagaacttaaactcaattcttctaagttgactgctgttttgattaaagcgcctgggctctcagaagtggactcttcctgggtgttagtcacaagggcttctcagaatttttctcctacatatgagacagcagatcatttctgcctctctgctaagataagccaagcaaaataatagattgtagaacaattaataatgcattcaaaatgccaaactcagcacactttctatcctttgtgaaaaattttgttcccattttgtccaaatgtctaataaaaatgattgtggaaaaataaaaacaatctttgatctgcctaaatgaaaataagaaccacaacttctagctctcagaacaaatcaaagttgtttttatttttaattaagtatgctaagcttaagtacattttctcttaaggtgtaattactaaaccatgatgatttctttttgtttattcatttaaaacacaaataaaagcagataatcaatagatcataatctaaaactagaggatttacaagttaataagcttgagtcaatagatattccataacaaagctttcaatgctgaacctgacataatttgctttgcactaagctggttgacttaatgctttaatttaattccaatattaactgaaaaatccaaagaaaaggggaaaatttaaatcctattatactgaaatatgttcaaagcaacaactcaatatcctgccacaactgcttaagtgtgccaccaaatgtctgcttaatcacctggtttctgattggtgataaccagttaacccgtttggagcctggtacaagtgaattgtggaagtttctcagtggtccattcatgcaatagcttttatcttagcctcaacagtcatcatattttcatctcataatgtctacttttcctgacttatggccaaattattggagttgtttttatttgaaaagcaatttctccttgtctcttgagattaccatccagcctgacctcccaaaaagcagaacagtaggcaggcctaggtcaaagaacagaagaaagcctttcttagttccctgaaaggaagatgtaagaagctatctgtatgaagaaatagcattagatggcatccatcatgcaaagtctggtagtactagtagaggtagtgagagggatgtgaggcaatatccagcataccttcaaggttatgagcacagactcaaaagacaggatccccccaggcaaatcctggttcttccccttacaattatatgaccatggacaatgtgcttcgactctcttttcatccatttccttatctgaaaaatgagggtcataatagtgtctatctcataaggttgttttaaggcttacacaatttaatatacataaagtacttgaaaagcactcattgttatcatcctttgagatactcttgaggcataaggaacttatgctaagaataattttgagaacagcagcatcagtcactgaatatagtagtcagatgtgtctttcagaagagttatgtgtgcacggccaaagtcctaaatattccatttgttaccatccttaaaatatcatttgtgaatttgtaactggtttttgctttgtgtcattgctggtcgactgcagtcagggtggcagtgttttggctgccccctaccatctttagttttctggtcccattagtgttgtgaccaagaacaagttagtgccctttgctcaagtaaatgggctagaagttaagcactgaccttttaccataggggacccttttctattctgaaagagaacttagaaaacagaacagaaatctcattgatttttacaatgcacattttttcatatttctccgtctctgaaattgcatgcatctaacaatcttataatcactgtagatggcagttgttacatacttgtcatttcctgtgcctgcacaaactctcgtcacttcacttgagttctgtgcaccgttggtacgacacacacattgagtttaattgccacttaaaatggcttcaaaaaatcatactatgatttggcattaaaataaaaagtatacacaaaaggcacagaaacagtcacttcatataaaacttaaaaagaaaaaacaaactatgcccatgcaagtctaaagaagtctttcaataagtataaaatacacatctaagtgataaaggaatcactgtgttcttgttgaattagcagcatatttttctctttcttagggatacataaaatagtttttaaaaaaataacagtgtgtttaaatagatgaaatcctggaccccaaaaataggtgtgttttataataaatatttttaaaacagctagcatattgccaataagataatgtatttaaataaaagataatttattcattccgcagacatctatagagcacccatatggtgccaaacatattttgtatccctagtccctgtcctctaagagttcaaggtctagtggggagaaaaggcaggtaaatagatcaatctaatataaaaatgccataaacagcagaaagaacagagaagagagacaagtaactcagtctggggagtcaagacactcttccaaatggagatgacattaaatttgtattttcaaggatggaaatacatcctttccaggcatagaagggcattctaagaaaagaggaaatcatgaacaaaagcgcagcctcattgaagagtgtgttgtaactgggtctgagtcatgagtctagggacagggtgtgaatgaaagaggcagaccagggagaggctaaggatgtgcccaaagagacaggctgcaggagattttgctggtaagggctggcaatcaaaaccaccctgcttcctaaccaggtctaggctctggcatcactctgacttttaaattaggaaagttagagcttgattcttgcacttgactctgtcaatgcattaggatctaggagagatggtaagtgatgttggaaagcagtccaaagttcataagcagttagctatttccatccaaggatgccatgatttcctctcctgaaactaagtgaacagccatgggtaaaaatgaactgaaggcagaacatgggcctctcatgtaaaagcagaagtaggggattcccaggcaagatggccaaatagaaacagctccagtctgcagctcccagtgagaccaacacagaaggtgggtgatttctgcatttccaactgagatacccggttcatcccactgggactggttggacagtgggtgcagcccatggaaggcgcagaagcagggtggggcgtcgcctcacccgggaagtgcaaggggtcggggaactccctcccctagccaaaggaagccttgagggactgtgccatgaacgactgtgctatctggcccagatactacacttttcctacagtcgtcacaacccacagaccaggagattccctcaggtgcctacaccaccagggccctgggtttcaagcacaaaaccaggcagctgtttgggcagacactgaggtagctgcaggagtttttttttccataccccagtggcacctggaaccccagcaagacagaactgtccactcccctgaaaagggggctgaagccagggagccgtgtggtcttgctcagtggatcccacccccatggagcccagcaagctaagacctactggcttgacattcttgctgccagtacagcagtctgaagtcaacctaggatgcttgaccttggttcggggagggatgtccaccattatggaggcttgagtaggtggttttcccctcacagtgtgaacaaagccaccaggaagtttggactgggcagatcccaccacagcaccgcaaagccgctgtagccagactgcctctctagatttctcctctctaggcagggcatctctgaaagaaaggcagcagccccagtcaggaacttagagaaaaactcccatctccctgggacagagcacctgagggaagggctggctgtgggtgcaacttcagcagacttaaacgttcctgcctgctggctctgaagagagcagcagatttcctagcacagcacttgagctccgctaagggacagactgcctcctcaagtgcgtccctgacccctgtgtcttctgaaagggagacccatcccagaaggagttcatagacatctcatacaggagagctccagctggcatccggcaggtgcccctctgggacaaagcttccagaggaaggagcaggcagcagtctttgatgttctgcagcctccactggtgatacccaggcaaacagggtctggagtggacctccagcaaactccagcagacctgcagaaaagcgccctgactgttaaaaggaaaactaacaaacagaaagcaatagcatcaacatcaacacaaaggaagacaatgaaacaaccccatccgaaggtcaccaatatcaaagataaaggtagataaatccatgaagatgagagtaaaccagcgcaaaaaggctgaaaattccaaaaactggaatgccttatctccaaaggatcacaactcctcgccagcaagggaacaaaactggacggagaatgacttcgacaaactgacagaaataggcttcagaagcaaggtaataacaaactcctccgagcaaaaggagcatgttctaacccaatgcaaggaagctaagaaccttgaaaaaaaaggttacaggaactgctaactagaataaccagtttagagaagaacataaatgatggagcagaaaaacacagcactagaactttgtgaagcatacacaagtatcaatagccaaatcaatcaagcagaagaaaggatatcagagattgaagatcaacttaatggaccagtgcaagaagattagagaaaaaagaatgaaaaggaacaaacaaaggctccaagaaatatggggctatgtgaaaagatcaaacctacatttaattggtgtacctgaaaatggcaaggagaatggaaccaagttggaaaacacacttcaggatattatcaaggagaacttccccaatctagcaagacaggccaacattcaaagtcaggaaatacagagaacactacaaagatactcctcaagaagagcaaccccaagacacgtaatcatcagattcaccaaagttgaaatgatgaaaaaaatgttaagggcagccagagacaaaggtcgggttacctacaaagggaagcccatcagactaacagtggatctgtctgcagaaaacctacaaaccagaagagagtgggggccaatattcaacattcttaacgcaaagaattttcaacccagaatttcatatccagccaaactaagcttcaaaagtgaaggagaaatgaaatattttacagataagcaaatgctgagagattttgtcacaccaccaggcctgcattacaagagcttctgaaggaagcactgagtatggaaaggaaaaacttctaccagccactgcagaaacataccaaaatgtaaagacgatcaacactatcaagaaactgtatcaactagtgggtaaaataaccagctagcatcataatgacagaatcaaattcacacataacaatattaaccttaaatgtaaatgggctaaatgccccaataaaagacacagactggcaaattggataaagagacaagacccatcagtgtgctgtattcaggagaccaacctcacgtgcaaagacacacataggctcaaaacgaagggatggaggaatatttaccaagcaaatggaaagcaaaaaaagcaggggttgcaatcctagtctttgataaaacagactttaaaccaacaaagatcaaaaaagacatagaagggaattacatagtggtaaagggatcaatggaacaagaagagctaactatcctaaatctatatgcacccaatacaggagcacccagattcataaagcaagttcttagagacctgcaaagagacttaaactcccacagaataatagtgagagactttaacaccccactgtcaatattagacagatcaacgagacagaaaattaacatggatattcaggacttgaactcagctctagcagatctaatagacatctaacagacctaatagacatctacagaattctccaccccaaatcaacagaatatactttcttctcagcaccacatcacacttattctaaaactgaccacataattggaagtaaaacactcctcagcaaatgcaaaagaatggaaatcataacagtctctcagaacacagtgcaatcaaattagaactcaggcttaagaaactcactcaaaaccacacaactacatggaaattgaacaacctgctcctgaatgactactgggtgtagaatgaaattaaagcaaaaatacatacgttcattgaaaccaatgagaacaaagatacaacataccagaatctctgggacacagctaaagcagtgtttagagggaaatttatagcaataagtgcccacaagagaaagcaggaaagatctaaaatcaacaccctaacatcacaattaaaagaactagagaagcaagagcaaacaagttcaaaagctaccagaagacaagaaataattaagacgagagcagaactgaagaagatagagacatgaaaaacccttcaaaaaatcgataaatccaggagctggatttttgaaaagattaacaaaataaatagactgctagctagactaataaagaagaaaagagagaagaatcaaatagacacagtgaataatgacaaagggaatatcgctactgatcccacagaaatacaaactaccatcagaggatactataaacacctttacataaataaactagaaaatctagaagaaatggataaattcctggacacatacaccctcccaagactaaaccaggaagaagttgaatctctgaatagaccaataacaagttctgaaattgaggcagtaattaatagactaccaaccaaaaaaagcccaggaccagaaggattcacagccgaattctaccagaggtacaaagaggagctggtacaatttcttctaaaactgttccaaacaatagaaaaagaagaactcctccctaactcattttataaggccagcatcatcctgataccaaaacctggcagagacacgacaaaaaaagaaaatttcacaccaatatccatgatgaacattgatacagatattctcaataaaatactggcaaatcaaatccagcaacacattataaagcttatccaccacgatcgggtcagcttcatccctgggatgcaaggctggttcaatatacctaagtcaataaacataatctatcacaaaaacagaaacaatgacaaaaaccacatgattatctcaatagatgcagaaaaggccttcaataaaattcagcaccccttcatgctaaaaccactcaataaattaggcattgatggaatgtatctcaaaataataagagctatttatgacaaacccacagccaatatcatactgaatgggcaaaagctggaagcattcccttggaaaaccagcacaggacaaggatgccctctctcaccatttctattcaacatggcattgaaacttctggccagggcaatcaggcaagataaagaaataaagcatattcaaataggaagagaggaagtcaaattatctctgtttgcagatgacatgattgtacatttagaaaaccccatcatcttagcccaaaaatgccttaagctgataagcaaattctcaggatacaaaatcaatgtgcaaaaatcacaagcattcctatacaccaataatagaaagagagccaaatcatgagtgaacttccattcacaattgctacaaagaaaacaaaatacctaggaatacaacttacaagggttgtgaaggacctccccaaggagaactacaaaccactgcacaaggaagttaagagaggacacaaacaaatggaaaaatattccatgctcatggataggaagaatcaatatcctgaaaatggccatactgcccaaagtaatttatagattcaatgctaccccatcaagctaccattgactttcttcatgaaattagtaaaaattactttaaatttcatatggaaccaaaaaagagcccatataaccaagacaatcttaagcaaaaagaacaaagctggaggcatcatgctacctaacttcaaactatactacaaggctacagtaaccaaaacagcatagcactggtaccaaaacagatatatagaccaatgaaacagaacagaggcctcagaagtaacaacatacatctacaaccatctgatctttgacaaacctgacaaaaacaagcaatggggaaaggattccctatttaataaacagtgttgggaaaactggctacctatatgcagaaaactgaaactggacccctttcttagaccttatacaaaaattaagatggattaaagatttaaacataagacctaaaaccataaaaaccctagaagaaaacctaggcaataccattcaggacataggcatgggcaaagaccttatgactaaaacaccaaaagcaatggcaacaaaagctaatattgacaaatgggatctgattaaactaaagagcttctgcacagcaaaagaaactatcatcagagtgaaaaggcaatctacagaatgggagaaaatttttgcaacctatccatctgacaaagggctaatatccagaatctacaaggaacttaaacaaatttacaagaaaaaaacaaataacctcatcaaaaagtgggcaaaggatatgaacagacacttttcaaaagaagacatttatgcagccaacaaacatatgaaaaaagcctcatatcactggtaattagagaaatgcaaatcaaaaccacaatgagataccatctcacaccacttggaatggtgataattaaaaagtcaagaaacaacagatgctggagaggatgtgaagaaattggaacacttttacactgttggtgggagtgtaaattagtttaaccattgtggaagacagtgtggtgattcctcaaggatctagacccagaaataccatttgacccagcaatcccattactgggtatatacccaaggcattataaatcattctagtataaagacacatgcacatatttattgtggcactattcacaatatccaagacttggaaccaacccaaatgcccatcaatgatagactggataaagaaaatatggtacatatacaccatggaatactatgcagccataaaaaagaatgagttcatgtcctctgcagggacatggatgaagctggaaaccatcattctcagcaaactaacacagaaacagaaaaccaaacaccacatgttctcactcataagtgggagttgaacaatgagaacatatgggcacagggaggggaacatcacacactggggcctgtcaggggctggggagaaagaggaggggtaacattaggagaaatacctaatgtagatgacgggctgatgggtgcagcaaaccagcatggcacatgtatacctatgtaacaaacctgcatgttctgcacatgtatcccagaacttaaagtgtaattaaaaaataaataaataaaagcctgggtgtggtggatcatgcctgtaatcccagcactttgggagtccgaagtgggcagatcacctgaggttgggagttcaagaccagcctgaccaacatggagaaacgccatctctactaaaaatacaaaattagctgggtgtaatggcacatgcctgtaatcccagatactcgggaggctgaggcaggagaattgcttgaacccgggaggcggagattgcagtgagccgagatcgtgccattgcactccagccaggtcaacaagaacgaaactccatctcaacaaaaaaaatataaataaaaaattttttaaaagcagaagtaggattacagaaagcagagaagcccaaaagatttgaatgttcactgacaaacacagcaataaagtatttgatattgcaggcttcatttgaagtaaagcttcaggaatacctggaaaccaagctacaggtggcactcagctccctaaccagcctttgccaagaggaggggtctttccagagacaaccatagagagtaatctttagccatgttatcgtctaatatcaaaaatagggggcaggccaggtgaggtgactcacacctgtaatcctaacactgtgggaggccgaggcaggcagatctcttgagcttaggagttcaagaccagcctgggcaacatggtaaaactacatctctacaaaaaatacaaaaaaaaaaattagctgggcctggtggcacatgcctgtagtcccagctacttgtgggactgaggtgggagaattgcttgagcccaggaggtcaaggctgcagtgaacagagatcatgccactgcaccccagcctgagtgtcaaagtaagaccctgtctcaaaaaacaaacaaacaaaaaaaaaagagggtgtaatggaagtgttttaatatgaccacggcatcctctcactgagatctgctaccatttattttattttgtttgtttagagacaggtctcactatgtcacccaggctggagtgcagtggctccatcatagctcactgtatccttgacctgggctcaagtgatcctcccaccttggcctcccaaaatgctggttagaggcgtgagccaccatgcccccatttgtaatttaagctgataaatgagagcaggggcacaagtctgtatccgctaactcttcagcaacagctgacccaaggccagcaaacccattgcatagccaacaaccaaccagatcctgtctttctgaagacacacagagacagtagtcagatggttatgactaataaggctgtaaggttgtttagactgacaattggtagccatgctgggcaaaagggaaagaaagaaaattaagagaaagggaaaagagagagaagtgccatgcagcccctgagtgacagagagagaaactcagttctgacagttttccagtttcaaaacccaaacctgtaaagttgacccttgaacaacacaggtttgaacaggtccacttacccatagcttttcttctgcctctgccactcctaagacagcaagagcaattcctcctcttccttctcctccttgacctattcaacaagaaaatggcaaggatgaagacctttatgacctttctcttccttatgattttcttaataactttttctctagcttgctttattgtaagaatgcagtatataatacatataacaaacaaaatatgtgtttgttgacagcttatgttgttggtaaggcttctgttattagtatcctgttagtagttaagttccgggggagtcaaaagctatgtgtaggccaggcacagtgggtcatgcctgtaatcccagcactttgggaggatgagacaggcggatcacctgtggtcagaagttcaagaccagcctggccaacatggggaaaccctgtctctaaaaaaaaaatacaaaaatttgggtgtggtggcacacacctgtaattccagctactaggaggctgaggcaggagaatcccttgaacccaggaggcagaggttgcagtggccaagatcgttccactgtactccagcctgggcaatagagagactctgtctcaaaaaacaaacaaacaaacaaacaaacaaaaacagaaagttatgtgatatgtagacgtttgcctgtgtaggacattggatcccctaacccttgcattgctcagaggtcagctgtagcttctgtacaggcttgggttctatacttgccttttctcttccttacaaaaccaatcaaaatgagtttcttttccctgtaactaaatttccttgactagaatattgattactgccaattcccacctttcctgtaagttgtaagttttagaatctggttgtttttttttattgggaaatacaattgatttttgtatgatcctaaaattgctgaactctataattgtttatttttagattctgtggaccttttaggtagttaataatcatatctcatgcttcaaaacccatgtaccttgtgttagaataagataggataggataggctctggtaacaaataaaattccaaatctcactacctaatgcaataaaagtgggaaagtcaaaggtggatttggctgcccttctccatcttatatcagtgtcagatcatgataggggaagagcatgctgcagagttctgcaagaagcttttaaggtccagacctggaaatagctgacattccttcttctcacatcccattgataagaatgtctcataacctctctatttaggggcagggaaactagcaactgcgaaaaaagtaaaataaatgaatatttggtaaattataataatctctgctgcatagctctttttatttccttatcttacattgcctaggattaccactacaataataaatagaatgcatctgtcttatttgttatattaacaggaagactgctaaagttttatcattaagtatgattttgctatatgagtgctgaatttttctcttgagatgattaaatgtaaaacaacttttctaagggctaaatcctatatggtcattgctctggactgaatgcagttgcccactccctttccaaatccttacaatgaaatcctaaccctcaatgtgatgttattaggaagtggtaaggggacaaacaagtgaagagacagatacactagagtataagatctatcaagtaataaaggtggacctgtgagtaaattcaaaccatttttctctcttgagtagccatgcttatgacaaagaaattttgaatgccttgtgggttgtttgtttgtttgttttgagatggagtctctctctgtcacccaggctggagtgcagtggcgtgatctcggctaaccgtaagctccgcctcccgggttcacgccattctcctgcctcagcctcccgagtagctgggactacaggtgcccgcaaccacgcccgtctaatttttggtatttttagtagaaacggggtttcacagtgttagccgggatggtcttgatctcctgacctcctgatctacccgccttggcctcccaaagtgctgggattacaggtgtgagccaccacgcctggcaagaaattttgaatgtcttgttttcaacaaatagttttaatttaaatcgaaaagagtgtgtaggtatgagttgcgaatttgtaattcatttgcgattctggtattgatggattgtcttatcttgtacaggtcatttgggccctatggactttaggctcaacaacaaaatcagacagttggagtacagtgccagtcacaatttttagactgtttaaccctaaatgtctttctaataggccttatttatatgagaacattttatagttaaccacaaatattttgtctgtgtttatcaagagttacaagcatagcagccctttctttactgaataaaagttcaaacaaattggattcatctttatttggagctgccaattaaagtgggatatagtatagttaagcagtactcaacatgtaggccactaatctcttagggtcccaaacactctttcaggggctctgccagggaaaaactatgttcatactaacagtaagaacttacatgtctttttcaccttcatccccttcatgagggtacactacagtggagttttccagaggctccatgatgtatgaggatgtagtcactctgctggctagtcgtatacatgtctcagtattcttttcctttaaacacttctctactttaattttcaatatggtactattgatcgatataaagatcagaaacaaaagttctttgggatcttcagttgtttttaagaaacaggggtcttgaaatgaaaacactggaactactaatacacttcacaagtacattttacctccacatagcacagaaataaaatcataaccctgtctcttgtcagcagtatgactctaggtaagacatttaacttatctaagcctcaatttccttatgtataacaatacaaatctcctagcttcatgtgaagatgaaatgggatacaccaagtctgacatagtaggagcaaaaactttgctcacaaataatctaccttaggaaggatagacaagaaaatggtaaactggttgggtgcagtggctcatacctgtaatcccaacaatttgggaggccaaggcaggtggattgcttcagcccaggagttcaagaccagcctgggcaacttagtgagaccttgtatccacaaaaaaaaatacatatgtgtgtgtgtgtatatatatatatatatacacatacacacacacacacacacatatatatatatatatacacacacaaaaattagctgggcatggtggcacacacctgtggtgactcaggaggctgaggtgggaggattgtttgagtcttggagacagaggttgccatgagccaagatcatgccacaatactccaacccgggcaacagagtgagactctgtctcaaaaaaaaattaaaaacgaaaagaaaatggtaaataaataacttttgttaccataagggaggagaactaaacaactggggcatgggggaggagatggggaacttttcattgttgctgcacccttcacttagaaggtccagtttatgaaaagtaataatttagttaaaaccttcaaaaatgatttttaaagaatttccctgctcctcatagatatagcctggtagtttacataccacttcattttctatgaagtactgttgttgcaaatttatctatgcaaagagctaagcatgcaatgattgttgctgtgggtataaaatactgctttgctaaggatactgtagctaactcacagttaattggctgaggcctgagcacacccatatcagtttgccatatacagatttttggttaacttgatttccatatgcaaagtgagaagaaagttctaattcatatatatatatatatgtaaaatatctttctctcctgagtcatcaatctctacctcattattgaaaaattgccatcaatataaaaatatactcctggtatctcccattttttaaatatgtgactccacgggcccctccagctaccatctcctgttcctgttcccctttacagtttacagccaaacttctcaaaagaatatattactattccctgtttctacctctacacatctgttctcccttccacccactccaaccaggtttctgtccttatcactccattaaaaggctcatatcaagacgatttgccacgaaatcaagagctcttcctatgcacagcttccttaacatttcagcagcatttgacactgcttaccacacttctttaaaaaataccctcttctctcagtttcaaggagaacacactgtattggttttcttccctttattgtcctggtctcagcttctattactgatttcctttcggctgctgtccaagtcagcctcatcctgcatctgccactgagtttggtcctgagctctctcttctacttgacctacactctctccttagactattcctagactcattcaagtctacttcttagacttcactctacattcgcttcttcaccccagcccttcagcttaaattctgtccatattcactgataatacaaatacttttgaacacttactctagcccagccacaattagaggcatttggggtttagagagaatgaagtagatgcaggcctttgactctgtggagtttacattctggcaaggaaagacagacaacaagcaataatcataaaaaaatatggtatgttagaaggtgatgagtgcttaagaaaataaatcaggataaaaagaatcaaaattgggaggagacagggaggagagtgggtcagttgcagttttaaagaagagtggctcattgagaagatgagctgaagttactcatgcaaacctatgcataaagtgggttgcaggcagagaaaacagccagtacagaggcctcaaggcacgagcttgtttagtatgttttaaaattttcaacaagactagtgtggctgcagtgcagttttcccaggggaaaatgataggagacaatgtcagaaaggaagtggaagggtgggcagaaagaacaggctttgattatgaataacttgaggaactagaacagggttttgagcagaggagtgacatgatctgacttgtgtccaaaatacacttttgctatgtggacaatgaggatttaaggttaaaaataggctaactggctgggcacggtggctcacacctgtaatcccagcactttgggaggccgaggagggcacatcacaaggtcaggagttcgagaccagcctggccaatatgatgaaaccccatctctattaaaaatacataaattagcctggcctgttggtgcttgcctgtagtcccagctactcaggaggatgaggcagaagaatcgcttgaacctgggaggtggaggttgcagtgagccaagaggctgcactccagcctcagtgacagagcgagattccatctaaaaaaagagaaaaaaaggcaaactgaggctactgcagtgctgagagtgggaaagtatggcttggatcagagtggtagtagtagatgtggtgtgaactggtaggattctggatgtatcttgaagttaaataaatccagtcctatttcctaatgagtagagtagatgtgaaaaaaaagagaaaatgaatccaaagtttttggcctaaacaactggaagaatgaagtcgtcatcaactgaaaaaaagggaagactgcaggtgaagcagcttttctaggtacatcagaatcatttcagtcagggagactgaacactatgggttttgagatagaaagtttattattattgttcattagagacagggtcttcttatgttgcccaggctacactcaagcttctgggctcaagcaattcttccaccttagccttccaaatagctgggactgcaggtttgcatcaccacacccagctaaagatgagcgctttctctaggaattagaccttacgcaattgtgggaatagctgggaaagtgaagatttggggaggagagtaagaagatgggtaagggagttgccaccatgcccattcaagaagccaaggatggccagccaccttagtgtccctaccacagatgcctatggagaggtctatggaaagcaactcctctgtttagctaccatctctgtggggccagcactaagtgtcaggtggtagacctgggccactattggttaaagagtcagcagctggaaagaagagtcagattggagtagaggagaatgaggacaatctggaacccacttgcacctctgtgtctattcatcttcacatctaacttcaaccaacttcgaagagtaatggccactgatttactttcattctccaaattgtatgtaaatgtatctttaatccagaactagatagagaagatatattactgctatatataacaaagtacaacaaacttagtagcttaaaaacaatttctacttgttatctcacagttcccctttgtcaagagtctcaggccttttgttcgaggtctcataaggctacaattagggtgtctgttgggctgtgttctcatccggaggtttgaatggagaaacatttacttccaatctcattcaagttgttagcagagttcatttctcttgtgtgggaatgagagggaggccctggcttcctgttggctgttggccctcatgtcctagagaccacctagttcccctccacaggggtccttcacaggccctctcatagcatggcagtttacttcttaaagaccagctgaaggatttcactttcagtctgctgagatggtgtctgccatatttatggcagtgacatcctagagttttgccattttctattagttagcaacaaggcataggccctgactgcactcagggggagggagaatcacacaagggcatgattcattgcaggggtcaccttaaggtgtgtctcccacagaaggaattctgagatatgcagtttcaccttaaccaatctgacataatacaaacttcaaaaaagggaaaatcaagagatcatatggagacttgttaagtttcagatgtattagacatccaaatgaagaggttaacaagacaattggatacaagactggattttgggagatatgtccaaggaccctcaaatgtgtattcctaattcagtctcttcccaaaactatagtttcattggtctgtctacttgacatcttgaacttaacaagaccaaagttgttccttcccttcccaaatctgttactgctcagacttctacatctcattaaatggtaccctcacctaccctttctctcaagaagaaaaacctaagagtcgtccttcattcctctctttcccttgccttctacattcaatccatcataattctattggttctacattcaaaatataaatctatccccttaattctatgtctaccattaccaccctagtccaagccactattaccccttcctggccttcagcaaaagcctttgaatgtctcccctccctctcttgacccatgttatgaaatggattgtgttcctcccaaaatgcatacactggagccctaacccccaaggtgactgtatttggagatagggcctctaggaaggtaattaagcttaagtaaggtcataaagatgggaccttcatcctataggattaatgttcttataagaagaagagacaccagagatatctctctgcatgcacacaaagatgacacggaaacacatccagaagacagctgtctataagccagaagagaggcttcaccagaagccaaccatgaagacaccttgatcttagacttctaacctcaagaattgcaagaaaatgaacttctgtgtttaaagcaactcagtccatggttctttgctatagcagcccgagtagacaaatgcaatggcctccatatattgttcacacatcagccagaatgagttcttcaaaacctagattaaattgtgtcacacccttgtttacaggccttcgatagttttccactgaaattggaatcagacttgaactctttaccttggcctccaggattgataccatctagctcctgctcatccttttgaccttctcttgggccattcttctctccatcacccagcttggtcgcactagctcctttctgtcaacaaaaacaccaagtctgttcccatcttagagtttctgttctgctcttgctcccaaaactttgtcccctgattcttcacacagatggtgtttttctgcactcttgcctaaatgtaacttcttcaaggacctttcttacccgcccttgtaatcaagaatttcattcactcttccccaatacctaagcccaaacactaattagtgcaccaccctacttattcccttcataatttaccacaatttccaattctctctctatgtcttgatctctctatctccctctgtttatatattgcccatttgtcctcctttataatgtaaaattcgggaaggtaatgaccttgcctcccttgctttctattgtatcctcagagattaggagcatgcctagtgtataagaagctctcaatacatgtgtgtttaatcaaggcttaaataaatctaaagctatggcccaaatgaaaatttttatatgagttttagtacagttttgccactatttccatagaatagattatcagagtgaaattgctgggtcacagtgtatgcacatttttaattttgatagatcagaagtactgctttttaatatttagtgtgactgatttgccactttaaaatttaattatcacaaatttaatttttttcctcttctcctttgaaaaatgaggcatttcaaaaccatttttcccccaatgtttttatggtaactgaagcatcattgttcattttgcaataactctagcttttgctttataggttaaattgatacagccaatttgtctataaagaaaatgtctgtgaattgagtcttctttttgaattgacccctccattacaaaatgaatgatgtattctaaagagaggaaaaaaaaaaccttctcccttttcacgtatcattcttcttttctgagtgtagagagttgttggagtaaaagcattaaagtgatcccagtgttaatatgtggatcctccaagctgaacattttaagtttgaaatttacaattgttataacaattgtcccctgcctaatccattaggtgacagcattagctagaacccagagctaggaatgctttaacacttatgagtacatttgagttggcctcattgttacccagtcgtcaatagtgtccttaacatttccagctgcctcatcactgtttgatatgtacaaggggctgggacaagggtgtagagggttccactcaaacatgtccccagtatcaggagaaaacacacttcaggaaggcatggttctgatagtgggtcaggaaagaaaataggaaaattggttttaacaccattcagttattatacttcctgcctcaattgaaatcaaaagaaaaatccttgtgtctaaagaataattacaaattttgaaatagagtgaacgttccataaagaaaattttaaatcttttttctaagaaaatacttttcctattaccttgtgcaaatggcaatctatacttattggctgaataataattgagttaattaattaattcctggcagatttattatttcattagtcactgaccatgatctataccacgatagggtgaaatttaaaagttcttccattattccttcaaattgcattgcagagctcttcacacataattaggtcttaaattttttgcctaatgttacttattgtttcctaacaaatgcagttcaaaaactttagagtgacattcacagccctctttagtcttatcacaatcccctttccagccacaatccctactattcccctgcaaccatcacacttctgctttgttgaactgccacccaggtatctccagaactttctactgttccttcttctaatccttcatctatttttatctgctcaaattctacatctttcctgacctggatcaaatgccacgtctcaattaagtcttccccaagtcctcaccccctttcttctgaataacaagtatttccttagtatttctctggtgcttattatagcactgccacactgaattgtgtgtatgtatatacattattgatttgctctattagattataagttcctcagagtcaagagtctgtgttacccatcttgtatcttccattgcaattttatagagtcttttgcataaaagatgctcaaaaatgtttaaagaagtaaaccagctgctgagaaactgctaaatgtttgcactgagcattttggcagctgtgtcatcccacttggtgatgctgcctagcacatacacactaaaacaataggcctgaacactaaacaataggccatggtcctaaagggtattttgttctacctttcttgtattgtgagttgatctttgattccggagcaactctgcatgtacgtgtttgctgtcaaaataaatgtcttttttgtctcaccagctgagatacatttaggtgaagatggcactggtaaaggaagtgtgcaggtgaagttggtgaaaatgttctgacaatgtttatattttgcaggcttggaagtctcatgccaagtgaaccatggataagtattcaagtttgatatttgcctaatgcgtggtaaaaaaataataataataatttctgtatcaagactgatttgatggccaggctctgtggctcatgcctgtaatcccagcactttgggaggccatggcgggtggatcacctgaagtccgaagttcaagaccaacctggctaagatggtgaaaccccgtctctacttaaaatacaaaaattacctgggcgtggtggcgggtgcctgtaatcccagctactcgggagactgaggcatgagaatcgctcgaacccaggaggcggaagttgcagtgagctgagattgcgccattgtactccttgcatttcagcctgggcgacgagagtgaaactccatctcaaaaaaaaaaacaacaacaacaaaaaaaaaaaactgatttgaattttgcaaaatagtattagacataaatatgttgatcaacttttggggaacttaaaggttaactttataaatggagaggaaaaatcgtcctgcagaatccacgcctcaaattatctggctttcaaaaatctagaaaaatattttgtgttgatttgtctacattacgacatataaaagtcatccaattgcctggatgtactctatccaaagtcatggcttttagataacagttaatgggagctcgaactgcttctcacattttatttgtaatctaaatcagaaactctaggtctcaggtataatcattccttatcattaagacaaaataaaatataattaatgataaaggatctcggcagttcaacttaagaatacagaggttaatatacttaaatctagattcttctgaagttctctttgcacaaaaaggtgaatttttgatgtgacttattctctggttcttggtattcatcataactaaggaggcaagggaaccccgtgacttggttgggatgcagaagccaaaactcatccatttcaggataaagagcccaggataagggagaatcataaatgaaagacaaagccagaagaaatcccactggcttagaatgaagttgatggtgaccaggaagattaaccctttccaaaatataatatggacacgtaatactctgttgatgaacacaagagtgcctatacatcattgttttggttcattactgggagcagggtaaaaagattcctaaggtctacagtaagtgagcttagtgaaaatacaccccaaagaccagagggaaagctctggaaactgctggatcatcagatcaatagactcaaagatgactaagttgggaagctttatgcagtttaaacatttgtgcagggagtatccccacacagccttttattgacagctacagatcaatggtaatttttgatcattttcaacttacataaacctattgaccccatggccacctttggggcacttcaagtcatcaaaaataatcagaggagatggtgtaaaattgtcagactgctgaagactccaagtagttgcatatgtccccaggagctgagtcgagaggttaaaatatagttcaaattgccagcagaacctcaactgacagagtgttccagagagtcttgtctttatgtctcataaaatgaggcactgatttgtatccaaactctgaccttcatgcatataaagttaaagaaggaaaaaagaggctgaatcccattgaagatattagattgcaaagaatggattattcctagtaaaatatttcttcctgtttttctttgttgagtcatcttcttcatctgctgcctaacaaaagtagctgacatgcttgtagaattacgtacaatatggacgtggacatagaatgaacaaagacaaaacagaagcaagtgcaaggtggcaggccagaagtcagggacaacaaaaaatgtagtcaaaaaaatcattaggaagagtgaaaggaaggaaagagcaaaataatggcaataaaggggaagaagtaagagtattgaattaagataatctctatagaggaaaaggagtgagagaagaaggaaagggtgaataagaagaaagagaaaggaagaaacggaagaaaagtgaagcaaaggagtaaaaggaaggaaaatcgtctttagtgatgacttttcctagttagtaagacagaacgctacatctccaaaggaaggaactgaatccaaaacatctaagatccacagtgctcaagcaaatatcctaaatttaagaaaaataacaagaaacttagtacgtaaatgagagccaacccaattcacagagtgaactgcatccaaattttgcagcaggattctaaaatagtgaactttgatgttggaaattcattcaggagagaataatataaattatttcctaaaacgtcaaagaataaattggcaaggattatcttgtcatttttatgttttcttcattttttaatatagcttttactaaacattgacaaaaaccatggctattgtttagatctatttaaggagtctatatgtggtttgtgtgtgtgtgcgtgtgtgtgtgtgtgtgtgtgtgtgtgtgtgtgtgtgtataaaactattcaggaataacaaagtagccagatgcagcagtggcttgcacctgtaatcccagcacttttgcgcagccaaggcagaagggtgacttgagctctagagttggagaccaacctgggcaacatagtgatacccaatccctacaaaaaaaggaaagaaagaaagaaaagaaacattttgttttaattagccacacacggtggtacatgactgtagtcccggctactccagaagctgaggcaggagaatcacttgagcccaggagttcaaggctgcaccgagccatgatcatgccacactccagcctaggcaaaagagccaaaaaataagaataataataataaattaaataaataaataaataatgtaatatgagaacttgtcctcagtataatttcatgatacagaaattacttttacatcccaacatgtggttatttctctcccttttttttttagatacatgtagaccaggttaagcaaaacaactgttgtaatgaccctttgtaggagtatacccctaaaaattttctgtgccaggcatgcatgaacttcagcttgcaacctacaggccatatttctatattagatggtggaggtttggaagctagggcattttgaatacttctgctttcaaggatctgagccgtaaatgtttattaaacgaatctataatgaaatcagttttgttatttttttaatggttgcctggagtgtgttggatgactgaatgccagttgttaatcattaagtactcatgttaccaaaagtgtttgatagtattgccatctaggggctgaatggaattctcagctctgaaataaattataattgagcaggtgcagctattgacaatatacatatgtttttgctttatagcccacatgcttttcatgtttcttatgacaaaagcttatgaaaaaatgtcccccagcagcccaccttttttatatataatctgttagaggtgattactatttgctttggagcgtatgcttttttggcatctattactgaatattctgaacaaagaattattcttttttgcattattaatcttgcccatgtttgccctatttccacagaaaaggaatcatttatcagaaaagagtgtttgtaatcgggacttgtagcatcttcagatttaatattcattatggtcattctagttctgtgctatatttatctaaaaggccaatccaatgttatggagaaataagtttttaaatatttatgatctaacttttaatattttaaaaaagagaaattagtatttctgtaaaatttgtttcagagtctgattgctcagcaaatgtttaaatattaaaagatttcaagaggttagcgtgtaatatcataatgggacttattgaaataggaaaattgactttacaagtttttgatatgtgaaggaaattgtattttctctgcctatgtttaacacataacaagaaataacacagttaaaatatacagccaataatgtcagaaaacagcaccaaaacctatttctacattgttttgtttttgtctaaccagtttgtttggaaaacaattctgtttgattttgtcatcttgttttagattttatccaaaatgatatttggatgcccccacacataattttttctgatgttcttgggtgcctactttcagaaataactttcactactccactttatattcttcttcccttgttcatcaaggaaagaagacaattgaagaccatgtatcacattcaaacatctaataaaccaaagcagatcattgaatgtaaatatcctactaacccagtcaaaactttctcatgatttcttatatccaatggggatggtacgcaacagaaaatgccagtgtgtgtgtgtgtgtgtgtgtgtgttcgtgtgtgtgtgtttacctatgaacacattactaccccacttgcatacataattcctactttaaaaggacatatcctttcagtccagatgtggaaagagcaccccagggcctttagaaacattaggattcttagctccagtttagttatgccaaatatgttaatgctgctctccaagcagaaaaacaaacaaattttaaaaatcctaattaggctatccctttttttcttttcttttaaagcaacaaagaccaaattctccaagcctagctaacaattacttttggtaggtttcatagttttacttatggtgcttttaacaaatgaaaatatttttatatctatattaataatagacttctctaagggtgtttgtacatgtatagttgaattggcttgttactgttttcttgtgtttatttgttttattgaattcgtaagatatatatacatgccaagagaatgagagagggagactgggaagatggagagtcttgtgtacaaacagatttggaaattaggggtgttcaggttaactctccaaacccttaatattaacctggcaggcaattatcccagtctcagacatgcagcttggcaccactgatttccattttgagctggatgcagcactgatctgaagcatcatgttttgtttttttttttaatgtttatatatcacacgctttgggctgcaagcactgaaaagtcaaggatgctatctggtccactttctgagtgtctgaaatcatacaacattgggtaatatattcacggtgtcaacaagaataagaaaaaatgcgttgttttcttaatgataattcaaaactctgctgtagtgtttgcgctgctgttgcctacaagctttggccatgaggttcagagaatgactttccagcaatattgtcagtttcaaaaaaaaaaaacaacaacttaacctgttaattttcttacagggaacaagccatcaagcccacctgtacgggttagaaccattcacaacatatcgcattggtgttgtggctgcaaaccatgcaggagaaattttaagcccttggactctgattcaaaccttagaatcttccccaagtggactgagaaactttatagtagaacagaaagagaatggccgggcattgctactacagtggtcagaacctatgagaaccaatggtgtgattaaggtaatgtctaccctgcataagaaattatgtttggtgttctccagataaatagatgagccctgacatgccatcaggtcactgtgggaaaactcccttcacagcctgtttaattctccttgatagctcctccaggcacttaatcatagatcacagaaacctagcttagatgtgtgatgcttcctataacccaacactgagctaaatgctctccatggattatctcatttaatcctcacatcaaccctactaggtgggtaccaccaaacctcatgaggcatatgcaggctaagtaactgcccaagcctacactgtaagtaattgagttgggatttgaagccaggaactcacatcagaactgaactctaaatgactgtgttcttactgcctcctgaattaccctacccagttatttgcttaagacttgcctaatttatgcttcaaacagagctcattaagcaagccacaggtgtctgctaacttcccaacttctgtatgtagccgtgagaaacaatgttataaatgttgtatacgtatctcaagctctgccagcccatgagtacagggggactgtattttcatgaatagcctgcattttgatgttttgaaccttcagccacacaaaaaccagccttcatctacctctctgatgttcctccccaaggatggtggcagacatacctgttagttcatactactgcctttacctccagtctctcctggccgtggtccatctcttaggccctcatcaactaccttctgcgggctgggactgcagagtcccccagcctgcagctgctatagacacactacccttttctttgccactccttctccaagaggcagactcccacatcaattccacatcacagggttgagactaagctgttacttttaataaagcctccctgaaaaccctaagagagggatgacagcaggaaattacgtgcagcaataactaagaactgtaactagagctcacagtcccaggtccatcctgtgggctgcctctctgcctagcttcaaggcctgctgcaagtagcagtagcaagctgcttcccaccagcctgcctacatgtggacagaagccagacttctcccccctggggcaagaggcttgagccttaggattcatgaccttaaaatccaaatcacggccccaaggcacccatcagaaaagaaagctccttttccctcaaagcacttctccttgtgggtatttggagtcatgagagcatctgcttcttggtggcataattgacaataagaatattgactccttggacctttatttacatttcaccaaatattaagcaaatatttggtgaaatacttctactaagtgccatatacttattcaagagtgaacaagacagtcaggttccctgatgttacagaccgtgtgtgagtgcacgtgcgtgtgtgtgtgtgtgtgtgtctgtgtgaataaatgtggcagagtatatgaatggtgggggtacagaaaagcaaacaataagctagtaaataaataagcaagggaattactgagagcgatgaatgctataaagaaaattaaatagaataatgtaattatgcctgctcaggctattttagaatggaatatcatttgaatcaagttgacatttgagctgagtcctgaatgacaagacagagttagtcatgtgaggatatgggggcaaaatgttccagacaaaatgaacagcaaatgcaaggcctgaagccaggaatgaacttggtgtattcaaggaaagagaagaaagctagtgtgtatgaagtatttgggagaaagaaagatggcactagaagaggttggagggactggtaggagacagattgtcccaacattgtaggctgtggtaaagtttagaatttgttccaagtgcaatgaaaaattactgaaggctttaagcaaaggaatagcatgatcaaatttacgtttttaaaaatcactctggctaccctgtggaaaatggactatataaggaccaatggagtttgagaactattaaagatttcaaggtagaattgaaggtgggtcaaattagagtagcagttgtgaaatcatgcactataggtgaatcgaagatacattcagaagatagagatgacaaaatgtgttaatgagctgaatgagagacatgaaggaaagggagcgctttgagatgagttttgggtttaggctttgggctattgatgaggaaggggagactggaagatgaacaagttaggagcaagtagatagtgtgaggtacaagtctaaaactcctgagagtgttctttgctgggataaatgttcagaatccgttagcaggtggatgttatataaacccatggtgccagaggagatcagctatggagagaatgtaactcaacctgttgagagtctgggatcaagccctgaggcataaatgtgggggtcaagaggaggaaagagagccagcaaagactgataagagggaactaggctagaaggaaaagtgcatgagtggagtgtccaaaaagagaagagaaaatatgccaaaatgttgctgagagcagaagtaaaatgaaggcagagaagccaccccgagtatagaaatgaggaggtcactgtgatctcgacaaggagagtatgcagtagaatgggaaacctggttggcatggctggttgaggagagaatggcaagggaggaagtaggacatcaactcattaaagccatttagatgaaaagaaaagcagagaaatggagcaataggtggagactgtgggatgggaagttttatttaaaatcattgaaaaatactagagtacatttaaacacgaatagaaataaccagtagagggagataaactggtgacgtaggagataatgagaataacggcagtagtgaagtcttggggaaggaggaagggatgggatacagcgcttaggtggccttcagtaggtacagagatatttcattcatagcaaaaggaggaaaagcaaatcatgtaagtctagattcacatggatacagaggtcagaatatataacatggaggcattcttctctaactgcttctattttcagtgaacgatgtggttatgtcaacaatcaatcaacggtgagggagggaagagggtgttagtggttaggggaaaggaagaaatatgaaataatcacctgggaaaatgacagagcaaaagcatgagggaataaaataggattacaaattggtaatcgcctatttaaaatgtatggatagaagtttaaagtgagaccaataaaaatgtttgggtgtttttctacaaacccatttcagagcttgagtatagagggacagctaaattttacactaattagagatttgccgggtgaatatcaggggcagcaaggggtgcttggggggtcacagaggctgcaagctagttatggaacctatgctcccttcagaagatatggcagtccccttcccacatgggggtggtcttgccctgggtcctcaacaagaaaatcacaccaacatacaacattccaacataaagaggtttccaaacttctaggctgtgtaatcttagggaaaaaatggagtatgttaacaatttagtctaaattaagcttgcccaagaaccacttctgggaatgtttcaagggtgtgccttccaagggctgtaaaatgtgtcctgtcccctcttgagagtcaccatgatagggagtcatcgaaaggagtgtgtcatctctctcaggtttgttggagcaggaaaaggttggaaaatcactgttcaaaaacacctgcattcagattaacttacttcccatctttcaaaaaaaatgaaaacttgctctacatttgtacagtataataagcattcagatgtttttttccagaacaaaagactactttgcccccaaaggagcaatcagttcttccatggcctggaagagaaaacagggtgtttttttccatcccctagtcataaagatttatatacatgtatatatgtacatgtatatatatgtatggatatttgtacttatgtataaaatataggtgtctgtgtgcctaaacacacacacacacaagcatactctttcagccctggcactctgtaacaacaaatgattaagcgttgtaattccatttcccagcaaatgccgtggaaggtagaccctactttagtcagtatgagatcagaagcagttcatatccataaaacaggagactttaatactattctctactttaaaaaaatacaaataggagaaaccttgtgaataccatttaagtcaaagaatctgattcaatagcccttagttttgagataaatgtttatgtagttcccaaactgaaaaaaaagaaaagaaaaaggcaaagaaaaacattgtttgtctctctgtgggccttatgttaactgaaaaaaatcacatatccccaattaatatcagaatacttcttctaaattagggtcatcaaaataaggaacaagggggtgaaggttaaaaaggggctaagtaactacacaaagaaattgtatgctgcaagttatcccttttgcttctgtccttctgtagacatacaacatcttcagtgacgggttcctggagtactctggtttgaatcgtcagtttctcttccgccgcctggatcctttcactctctacacactgaccctggaggcctgcaccagagcaggttgtgcacactcggcgcctcagcctctgtggacagatgaagcccctccagactctcagctggctcctactgtccactctgtgaagtccaccagtgttgagctgagctggtctgagcctgttaacccaaatggaaaaataattcgctatgaagtgattcgcagatgcttcgagggaaaagcttggggaaatcagacaatccaggccgacgagaaaattgttttcacagaatataacactgaaaggaatacatttatgtataatgacacaggtttgcaaccatggacgcagtgtgaatataaaatctacacttggaattcagctgggcatacctgtagctcttggaatgtggtgaggacattgcaagcacctccagaaggtctctctccacctgtgatatcctatgtttctatgaatccccaaaaactgctgatttcctggatcccaccagaacagtctaatggtattatccagtcctataggcttcaaaggaatgaaatgctctatccttttagctttgatcctgtgactttcaattacactgatgaagagcttcttcctttttccacctatagctatgcactccaagcctgcacgagtggaggatgctccaccagcaaacccaccagcatcacaactctggaggctgctccatcagaagtcagccctccagatctttgggccgtcagtgccactcaaatgaatgtatgttggtcaccgcccacagtgcaaaatggaaagattactaaatatttagttagatatgataataaagagtcccttgctggccagggcctgtgcctgctggtttcccacctgcagccttactctcagtataacttctcccttgtagcctgcacgaatggaggttgcacagctagtgtgtcaaaatctgcctggacaatggaggccctgccagagaacatggactctccaacattgcaagtcacaggctcagaatcaatagaaatcacctggaaacctccaagaaacccaaatggccagatcagaagttatgaacttaggagggatggaaccattgtatatacaggcttggaaacacgctatcgtgattttactctcaccccaggtgtggagtatagctacacagtaactgccagcaacagccaagggggtattttgagtcctcttgtcaaagatcgaaccagcccctcagcaccctcagggatggaacctccaaaattgcaggccaggggtcctcaggagatcttagtgaactgggaccctccagtgagaacaaatggtgatatcatcaattataccctcttcatccgtgaactatttgaaagagaaactaaaatcatacacataaacacaactcataattcttttggtatgcagtcatatatagtaaaccagctgaagccatttcacaggtaggtagccatgtctcggttttctgagagtaagccactgctgacctttctattgcctgagcccttggtcagttctaatgaagactctaaaaatgggatgcaaggtgtccccaacctccatccacctaaacgtgcatagtagacaaagcacatcctcacccaagcaaagcctgcttgcataacctccagagagcagaattctttcaggtgatgttttgagagtcagtgtttcagaaaggtttgcaatgcatcctggtatctgaaataagtaggacagagatgaggctagtccccctggaaatacgcaggcccctggacagttctgacagccccgatagggtcatctggccagactgtgaagaaaatgatgtattattttaaggttaaaaagtgccaatcaatgagcgcaattaccagccagagttagactaaaacaaaatttgtttcgtgaagagccttcttatcaaatccagcacttcttccaggaataataaggcttctctgactctactttcttatggtttctcaggacagtgccactttgctagctcatgttttcctagcggtcccatctgggctctgtgacatgcatggaagtgcgttgttctccacacaaaagaatcttgcccattgtttaaataattgtttggcagttttccccatcacattttaagtaacttacatccccagagagaagggtaataagagacattttatgcttaaaatttagtaaaatgaacagaatcacttaaaaaaattaaaggctgaaagagtgttgatttccaactacctcaggtaaaattcagctattattgtaatctagtgatgtgtagattagatcctcctataattacctctgatatatagtgctgttgaaatgaaacattcgtggttttatgcatctactcatgacaattatttagggtctattaaatattaaacagtaattaaaacttcctcaggtatcctctgcagctaatccacatgctatgtgagttggcttttatattaccttacactgattcagggcattaaaaaggtccactgtagctgcagagctgtatattctagactggcttcctctttacctgactgtacctccaactttcaaaaaccatatcaatttgctcccttttgaaactcttattcaaaaagtattctagaggtgaaagagtttgtccaggcatgaaaggaatgctttttccaggctggaaagaaaagtttaatttatctgataaattgcaaggatatttaagaatgtgagagaaatctcttcattatccactctaactgaatctgtaagtggcattgacataaaacagagtatcacttctatatgaagttggagttcatgcgtggttttttgtttttgtttttagtggattaatgttcactgaatattgcaaatgtgtgtgtcctcctttcagcacccccagctggtcagtaagaagaaatagtctgggaaagtcctaagtagcagaaggaatccagcccaaaatttaaaaactaccacggataacccagaaaatgaataatctttatgtgggaaatcaaaattgacttcacagaattgcttagaagtcagatctaccatacacagctatggatttgatcaccaataaactggtagccctgtcatggtggagatcggcatgagaggagaaccaggggaggaggagaagaaagtgggaataaaataagtcacaaagggaaaaaggtgtaattaagaaagcaaaaaggtggaagagacagaacatgtacaagaacagaaagcagtgattcaaagagcaaagaggggaggtagaaaatagaagaggaaaaggctagaactaaaaggaataaaggtagaaagaagatagctgggtgcctgcgggaaaattgaaggtgtcataaaatcaatggtggttgggaatagagaaaaaagtgctcatttacagccataggcactaaatactcacaaaaactcattttgttggaaaggagaagtccctgctatgtaaatagaccttttcaagtagcagagaccagctatgaggcaaaacataattgattagttgaatttaactggatggtgataaggtgtcttcatgattgataatctggtgtgtagttgggttaactttggccccgcaaggtctttgtatcatgtaagggaggctgttttaagctgttaggtatcaggtgaggggatttattaccactgagaccgtaattccatgatgttccttcatgacctggaaacattcctgggggatcattccatgatgttccttcatgacctggaaacattcctgagggatcatttagctctagctgcaaaggtaggagtccaggactgctgagaactgcttcatactttctaaggtctgcattcttcattgctatgttaagtaattctgaagagtaccagaattttcatgccggaaagaatcttgagagttatttattccatacatccttgtttaggggaagaattgcactcacccctttcgaacagatcaggaactttagtttagaaagccagggggattttgattgttcaaaaatttccatggaaatataatttttttttgagacagagtcttgctctgtcacccaggcgggagtgcagtggcgcaatctcggctcactgcaagctctgcctcccaggttcaagccattctcaactttgttattcttaagaattagctgtgaataagaatacatgtaagcttgtcttttttttttaaggcctggtgttttaaagattcttcccatgaaaatctattttgctgaaaatcactaatttctgccttatgtcctgaaggtatgaaatacgaattcaagcgtgcaccaccctgggatgtgcatcaagtgactggacattcatacagacccctgagattgcacctttgatgcaaccccctccacatctggaggtacaaatggctccaggaggattccagccaactgtttctcttttgtggacaggaccgctgcagccaaatggaaaagttttgtattacgaattatacagaagacaaatagcaactcagcctagaaaatccaatccagtcctaatctataacggaagctcaacatcttttatagattccgaactattgcctttcacagagtatgagtatcaggtaagaaatgtgtattataaacaattcgagctgattgtttgcacccgtcagcacctgcctgtaaaaatggtgcacaatttgaaaaggcacttaaagaaatgtaggacttaaggagaataataatattccttaaaaatttttaagtggtaaatgaggaaaaaccatgttcattgcctttttcattttcttggtttttgagccatattatatacgttgtttttcttaagtagattccaggtgaatttgcatttcttattagtaaagtggtttctgccattaagattccctctgtcagcgttgccttggtaggagacactccttatttaaagatcactttgaaaataactcattactcgtaccaaaataaaatcaaatagcaaacatctctagcctcggtgctcaagaaagatacagaatgttgaaaaaagtctagaggaatacaactcacctgcccatggcgatgagttaagttttctctgaggatggcctaaaaaaataagactgcattcttaaaaagccaagaattaagaataatattcagaaaatatggtgaattctgtggaggacttctgttaggtttgttttgttttgccatcagagtccatttgcattcttcttgtgataacaacctcatttcctgtgggagaatgtgcttcccccaccctttgctcaggcgtggtgggagtgtcaatcaatgtgtcaggctgtcttctagccaagtggtgggcacatgagccgctcagcccctcagatttgcctggggcttgatcttcagcagagtgactcagaattttaaaaggtggaggtgagaagtcgtgataaaatatccctaacctcaatctaaaagtttttcttttccctgctatttccaagcatggttcttcaaccgttcttttaattccataaactcacagtaaattctcatttgcttaagtcagaatcagtgcctcttgcttgcagtcaaagaaagcttactgactgatgtaagcacttaagtgccaggaacaatgccaacagaaattttctaaaagaggaaactgagccttaaaaagcttattataacatgaaatactaaaaataataagtcaccaaaaagatagtgaccaaatcaatgagtacagtgaatacagggaacattttaagcatgaaaagaatattttaggacaataatgtatgggacaaattaccgaattaataagatttaaaaatataaataaattctcgaatggtttggaaaaatacacagatataaatccataatcccttgtttgcaattccaagtctaaaaatctcttaaaagtattttcttgctttaccacaagtcatttggcaacaaaacccaatctaaacagacttgagactatttacagtatttatttatcccatttaatatgaatatttatatgttttgctacaaaaatattgctttattataagatggctaatcagatcatggtatggatattacaaaatatacagtatatacattttatcctatttcaaaatctaaaaacaaaattattttaaaacacatcaggcccccaagggtttaggataagaattgtggtttatgtcataaaggaacaaaatacttaccgatgccaccatcggaaacgtaacactgttagaaacagccagaacctacgtgcctgcccttttgttcttttctcattacctttattgagaagtgtcacgttatcaagctgtcagttatctagtctcccttacaaataaaaatggtaccttcgtgagagagctggatgaaatcagcataaaatcttcagccgctaattaaacgcaacttaatgacccatatataagaaacacaaactttctctggtattgtgttgtgtcattgggttaaattctggtcacatgatctgtggaagtctcattccagtttttgtttgtttgtttgtttctttgttcgagacagagtctcgctctgtcacccaggctggagtgcagtggtgagatctcgagatctcaactcactgcaacctctgtctgccaggttcaaacgattctcctgccttagcctccagtgtagctgagattacaggcatgcaccaccacaccaggctaatgtttttttgtatttttagtagagacagggttttgccatattggccaggctgatgttgaacccctgacctcaagtgatcagcctgccttgacctcccaaaatgctgggattacaggcatgagccaccatgccaggccccatcccagttttctatggaatggaaagctccaagcatgtgccttgtctctagtcagatttttcatcaggcactaaggatgactaagaacaaagggacccacatttcagaggagaggcaagttaagaaccttaggctgtgtggtttcttttgtaactgttactatcggctctgtgttacactcctcctccatactcatctcactcaaatgaaagtatttaatttggtttttgatctccaatttttatttattagctaatcccacgtagttacaacataaggatagaaaacaaagaaaatcaaaatctagcttagcccaaaggcccagttcttatggaaaataatattttgaaaagcatagattaaatgctgaaataaatgatcagaaaatattagtttcatttagcctgtgtaaatattgagtctatgtggaccctgagtaatcttacagaagtcatttaggaagttatatactaaaacaatttatttttctttaacaaaagagcatttttgtatttgtgatgaatttgcattgctctcaaaaccacttgagggttacttcatctgcaagtggcctttgaaaataccttcattgtcctatataaatctgctcacccagcaactgacagtgatttcacccttctgcagaggagtgtgtttttgaggtaattgtagattgtagggaataaaaacaaagacctgagaaacttcctagcagtggggaaggattaatcagaagatcgtgaggatgtatagttggggaggttgccacccacatggtgtgccttgcaagtatcagctggggctccccaccaccttcctacactacattacatcattgtactcatttctggttttgagttaaatcattgaaggcagttgttaaaatttagttatgtgaaaagaacaagacagttttcactagtctaaatcaactcattccatcagttggccagtgatagaagagggtatcgcatggataagttcttttgtttttctttcttcttttttttttccttcttctttgtttttttccttcttcttctttttctgagacacagtctcgctctgtcacccaggctggagtgcaatggcacgatcttggctcactgtaacctccgcctcccgggtttaagcaattctctgcctcagcctcctggtagctgggattacaggcgcccgccaccatgcgtggcgaattttttttgtatttttagtagagacggggtttcatcatcttggccaggctagtcttgaactcctaacttcgtgatccacccacctcggcctcctaaagtgatggatgagttctaacgggcaggagggtcaggaaatatctggagaaatggatacttatagagagggaggagctactcactgcagaaaaccaaagagggaaattaaatgagcagcaaatgtcactcacctcaccacaattcatataaccagcttgataactagctcctttgaaggtgagcaaaatccatgtgatatcacaagcaccttctaagtgttcactaatacttcaatatggaatgccctaaaggtagcatccccactgtttacagtacaagtggaggacctaagagcttgttcaaagggcagactcctgggtggaatgggaagggaccccagcaaccagtattttttttctttttttgagatggcatgtcactctgtggccatgctggagtgcaatggcgcaatcttggctcactgcaacctccaactccccggttcagtcaattctcctgcctcaccctcccaagtagctgggattacaggcacacaccaccacgcccagctagttttttgtatttttagtagagatggggtttcaccatgttggccaggatggtctcaatctcctgacctcatgatccacccgcctcagcctcccaaagtgctgggattacaggcgtgagccaccgcgcctggcctagcaacctgtacttttaacaagcagcctggatagtccacaacccacttttttttggaaatactgcctcagagggtgagacattgctgctatgctacttaagccttattttcaagcggtgattttctgaatcagtggttctcagctttgtgcattagaatcacctggggaaatttcacaacattctgggtgctgatacccagtccccattcccctgtagttctgattctgggatgggttctggaatccctgcgattcaaaaggttcccaggtgattctcatgtgcagccagagttgagaatcactagcctaaactgtcataaacagcccaaataagtgaagccagctccccacaaatgcctaatttacatgatgatcattgataatagcctattgacgttggtctatcctggctttcctaaagaagggtcctattgttttgatgtgaaactagaaaggagaacagaatatattatctacaaagtccatgtctcagctactcatataatttattttaatcttcctcatggattttatttggattttgttattgttgttttattttcttttgtttcttacttgggaggtccggtctttggtggtaagagtaaagttcaccatcatttaaaacaggggatttttctagtttgagtcatttcagcatagcttccagaattctgggattctgaaggataacactctggaggattagctttaataaagccagtgagatctaaaatatgaatcaaaaaattaggaatattactttttcttgttttccacaagaatgggttggtggctttacagagtgcactgcagggtcccattagaaagcaaacattctctgtgaatttcaaatgcaacttagtttaccaaaatctaattctcaaacaaccctgtgaatgtatgttccatgcataaatgcgatgcatctgtactaaataaaattcttccattgcacagacctcttccttaaacagagatcacagtcttgcttgtgctacagaatatttacaaatccaagaagatttttttaaagacaataatcatttctatcttcaaccctttcaaaattgggctattctaatacatgcagtgtgaacctccaaattctatgtggagcagttcttaactgtttagcagcaaattaagacaatatttttcccacaggctttgagagggacctgggtgtgagtctactctgttaagacattttggtttttacctttggggagtgagctgaggctaatgaatagctctcagtaattgtgcattcatattcatactcttgcttaaggcaaagactcaccacggatttgatagggcccgccaccaccccccctttcactgattcatgctgtcagtgacttaattagttttcctgaaactatctcactttgacagatttttgcggtaagcacccacgcacactcagggtctctgaagcattctggtgcctcatgactgggtgactgagaagcagtaggtcagtcttagaggaaactctgtgactcatggcatggggtctgaacttagggctagtgctgcaggagcccatgcagaatggcagtctgctgctttctaacagaccaacactgcccccaaacaagaggatggaaagaagggctgtggaggagacacagaaggggatcctcactgttgctgccagtggcagctgcctgaagactgccagaggtactgtggaggccttccctgcaccagcccccaccataggctaccaaatcgttggcgatgagttagaagtgggagggagaaaggccaacatcttctactccttctctcactacttctggatatttgagcacattaacctctttgggcctttcctcataatataaattaggcctgctatgatggaatatcatagactgggtggctttaaataacaaatatttatttcccacaattctagaggcgggaaagtacaaggtcaaggcacctgcagattcagtgtctggtgagggccaccttctggcttacagataatggtcttctccttatatccacatataccaggtagaagaacactagtccccttcatgagggctccaccctatgcaacctaataacctcccaaaggcctccataccatcatattcaagattagccttcaacatatgtatttgaaggggacaaaaacagtcagttcatagcactcatctataaaaggaagcaccctccagctctgtattctatgggcagagtagtggtaagctacaggtatataatttttagaaagtctaatcaaactttatcttctcttgattggtttttgtaatctacagtttgtaaaaccctacaaaataaattctcacccaaagcaacagaattttctaatggtatttagctttaagttgtgttgatgcaagtgaatgtatgaaatcagcttcagataataaatggatatatggttattcatcaccaagatggacacatggaaatataattagttgtgtctctcattgaaacctaacatatttattcactaatatattttttaaagtatagctatattataacatatgaatgtaaataaataataaacttatttagttagctacaaataagtctcatttatgttcctgagaaaacccacactatcaaaaagttgtcatgactatttcactacaagtaacagaaagccaatgtaaactaagttaaacagaagggaattgtttctgctctcgcatctgggaagggcattgaaggaatcccttgaaaccaaagaaaagatatgaacaccaggtcctggaaacctgggatgcaggactcggatgatgtaggattcattcattctgtccctccttgccccatctcagcttgtctctgtttggcttcattctgcacactttcaccaggcatctgaggaaatcactcccagattcaagccctttctgtgcatcagttttcttgtctttaaaatgtgaatagatatagcattggactcataggcttgctctgaggttaaatgagttaatatgtgaatgtgcttggaacagcacctcatacatagaaaccacttcgcccatataacaataatgattattattattacccatccaccttagagtggaaagaggactataagtcaaccaatacaggactctgactgatccttttgcactacctgccttcctgtgaaccaagagaacagaggactatgattgagcaggtgtggtcgcagggcccacctcctacaggcagggctgcatgaggtatgcgggaaatgcttccagccagaagcaagaactgccctagcacgctacacacaccaaccacgggaacaagtactccacacctgtgagatattgacaatccttgtgctctttcacattggatgctcacacccttcctgttttccaaatgaagaagctgagttaagatcacatagcttgtgcaagaaagatacttaatttctgataacttcacctttctcatttaaaaaaatgggtgtgttatgagaactaagaaatctgtgtgtctagtaggatgcctgctacttagtaggtccatgcccccatccgatccccccaggatctcactagttaaaagaaggagaaactttcattcaagactgtaaaaaagccaggttaagacatttcttttgtctatatcaacaagtcattgataaaatgttagagtgtaaaaatctcaatcaggagtacagttgcctctaaaggtgtgatactccttccgctaggaagttcaaccctcctcatccttgccatttctcttctcagaaaaagagtaatttacccacatacccatgactaaaattccaaactctgatagtctgactctacttttatgcaattagctacttgctttgtattgcctgttttctattgctgtcacccttaccccatctcttttctatatcacatttagagaaaacatattgaacacattttctgtttagttttggacttgcatttaattaggtattaatctcactaatgtatttccgaccagcatggaggtttttgtctggttaatttctcccacaagaactaagctccccacacccaccccaactcccacagctcaaggttttaaatgatttattgatattgtctgactcaggcagtgtatttattctaaaactttagggcctgagtgcacaggttagactgaaggccactgggacatttccatgtatagaaaactaaagttcgccactaggcccagggcctgatcattttttgcatcgagccttttgttcccacgggagatcatttccacctgtcagtgtgagcacattcaggagcatgctctaattctttttgttcttgttccatctctcatggcaacccttaggactttattctgaagcttctgttgttggcaatcttcatggcgcctttgggacaagttatccatgtgaagatgggttggttctcaccctcttgcagatgcaactcagatttatatttcacttaaggtgatgttgatcttcctgtctctgtgttggaagtttgtttgctgaaaataaaatgttaaacacaacagatgctcttcaactgaatgtagataatatgccattccagcctgccctcatggctcttcagatggccatgaaaacaaaggctcccaaagtcacctaaaacttaggtcctgtaaaaacatctaggaaagggtaagatgtgttttacttattttcctccatcctgtaaattgagtatttaataaactgtccttattaagcacctacaatgttcaaagtgtatacctagttactaggattgaggcaggaggctaaaatccatgcactctccccttcagggacttaaattatagttgataagtcaaataaagatgcccatgaataatgtatccataaaaatatggctaggaacgttgatgtttgcaggatctgagtgatggcaaaacagacccagggaggaagaagcagcttctttatcttcagggacagcacgatttccacaccaaactctaaaggccactcttattctactctctggccagatggttttgtgcaggacaggtggcaccttgatattaaagaggtacttgactaaaatcattccacagagacatgaaggggcaccatttctctgttccttcagtcttacaaaaagaaatccctttctaaatctccatccttatgtttagaagcctctcttagcccacctactgttattggtacccatgtaatggttcaaaatattctccactgtatcaatcgggatctcagcaggaaacatatggcacattcaaagggtatttgaagaaaatttaatgaagaggctatttatggaggtgtgggtagaattaagagaatcaataagggatgttgaagtacccagggagtaggaagagccagaagctgttaccttctaggcctgcagggacaatggaagaaagtgggtcattgagaggaaattcagccttgtcaacatgcagtgccaaagagaggagcaggagaaacaaagaacctgaactctctcttccctttgatcaaaacctaatggaaaggagccagaggagaaaagattccaggtgaggcagtctgatgaagtcagcattccagagtacagaccaagccagagaagggcagaggatggatctggggaaaaaccagctcgtcccccacactcagattgatgctgcttctcaaccagtatataataatgccttcaccagtagaatcctttctgggctagaggatcacctggccagctttggcttgtcaatctatgattattgataaaccactaagtaaatctgaagacttaaggaggattgtacttaagtacttgaaccaacagcttattacctttaaattgtaaataaacatctcaggatatatgaagcaatctaatctgcaggtggaaacaaaaatgttaacacattcaaataagtcagatgccttaaatggtaatttgtaagaacatagttgagacttcttcttgttaattgatttatctgttgatggagctgatcattactaatatgcctataagcatctagaaaactgtacggttctctctttgattcctataggcatatttctaatggaaaccagtaataaaattcttttctctaaagaatccattgaattgctctaattttttcttttgttcatgtttgaggactttttgagaaattttaactaattataaaacaaagtagagaagccatccaattaacaaatttcattgtagagcaatatttttgaaaagccaggcttttatttactctaaccctcaaagctctacagtacagaagtacctggaagaaagatacacagggaggtgtgggctaaattccaaatgctgtggggagttttccaatcttattaatgtgtaacaactaactggaatccaggagtgagttgcacaattgctatctagccccactagatcccccaaactgttaagtcattctctcctgtcttttcacacaaataatgtgatagtaatcactattatttatttagggtttgctgtgtgctaagggctgtgttaagaactgcatgtatattaactaatttaatctcaaacaaccatttgaaataggtgttattactgacactattttacaggtgagaaacatgaagcattgaaaaattagataccatgcccaaggatatagagttgataagttgaaggactcaaattcgaaccttaagattcagtttcaaagactggtttcttaaattctaccccaacagttacctccaaattgcatttgtatgcagctttgggactttcaaaaatcaatgaaatatttataaatgtattcatcccctaccccattcctcagaaatttctagaaacaatattgcatgtaaatcttaaaatagtcctgtgggatagatgttgttatttcttagcatagtcaagaacctgaatgatttagcaagttacctagtcaaaaagcaacagagtcagaactcaagtcctgactttctgaccccaagttcaaggtggctctgctgaactgcagcttcttcaagtcacctctatcaggagcacaaattcctgaccctgtgaagacagaccgattagggttgcagtctaggctacatgaattaccaattctggatcctcagctattaatttaaactcactaaacctcagttttcttatctgtaaaattgagattaaaaaaacaaacaacaacaaaaaaaacttaccccaggaaagttgctgtgaactttaaataagttgactttaaggctagggtattgtcacttacaaaaaaaagtaaaatttaatatataaatacatagaaggtgttcagtatccagcattcctgcaaaatgaaaatcaaataaagtcactctcctactgcaaaccctacttcccccattccataagatgcaaactcctctctagttccatgaggactttcgtggtctcatttttgtccaattctgtcctcatcccattgctttccggcccttactcactaaggtcagccacactggccttcttgaggatctagccttaaggcctttgcacatgcttttcttttccatagaatgctcttccctcagatcttcatctggtactttctgccaattgtttcccagcttgatggtcatctgttgagagaacctcctggataagccaaccattttctgctctatcaccttatgtatatcaccctacaatctcatcatttcctttctagcatatatcctaacctgtttattttatttgtgtttttattgattgcctctcctcaccaggatgttaatgccagccttgttcactgttgtatccccagctcatagaacagcatctggcatatagaaatggctcagtcaatatgtgttgaattcatggatgataaatggtcttacctaatttactatccttcacggagatgttaatcacaattggtgattgtgatcttagcttcttctagcaacttattgtggataaagtatatattttaatgctatatccattagggtatagttattattgcagagaacataatggaatttcaatgcatttacacatgtttgaacaggatgaaatatatgagtagtacttgcttctgtgtaatatgcaatattgctgaaagcatgataagtggcacgagagatggatgtcacgttgtttgtgatagtttcccctgtctcacttttaggctaccctccacagaaaaagccagtccacgcagggctctatgaaaagcccaggacagcaacccacccatgtggaaggtgtgtacaggccttcttttaatggccttatgtaggaagatgtaaagagtttgggcttttatgtcacatatctgtattggaaagccagccttaccacttaccaagttgcataaatttctgtgttcctcagttttctcatgtgtaaagtggggataataataccaaccatataggattgtcgagaggaaaaatgcaaaattagtacatagaatacacttacaaaagtgtaagtgctcaataaaccccaaaactacttttacatatcctccatgagagtcggatgggggtgggttcctgtttcctcttagggagagcagatataagaaaaaaaaaaaagtatgtgataactccaaattttgattatttagttttattgttaaaagtgaatcagggttgggaggccaaggcgggcggatcacgaggtcaggagatcgagaccatcctggctaagatggtgaaacaccgtctctactaaaaatacaaaaaaattagccgggcggggtggcgtgcgcctgtagtcccaggctactcgggaggctgaggcaggagaatagtgtgaacctgggaggcggagcttgcagtcagccgagatcacgccactgcactccagcctgggcaacagagagagagagactctgtctcaaaaaaaaaaaaaaaaaaaatcagggcaaatttcagtatttcacagtgttaggtcagtttttccttcttcaggtattagaggagaaccatattcacaagtattaaatggctccaaagagcaaggcggtatgagaagcagtagcgacaagacacccaattctagcatgggaaatgtcttgttatttttccagtagcttcacgtctctgaacttcaaaagtgctcatggaaagcaagacaatgtcctgctgtaccctcttcccctgggtcccagaattcaattaaaatcacgttctatcttgcctaatccaaagtgttttagatgaagggaacctggaaaacgggactatatctgtaaaagtgtgactgtattgtatccagcaaggttctatgcagatagagatgctggaaaacatccatttgatggtgaaagaaaatcagatagatagacagttaaataaatagctcctagagcttttcagcacattattccttcataactggagcctgcagggctactcatgaaataaaacaatcttgtaatcatgtaatttcaaattcattgcattgtcttttttgccaacattctttaaccgcgattccagcaaagaagatttcagcatattgctattcaaacatattcaaaacctatgacaagctaccctttaagaaggcattagcgtgagtgccatgggaaaatgtactccaaggttgtagatgaattgatatgatctccttgattgtatctttttatttatgaggcataatttctgagcactggaaagcaaactgcaatgagtgatgactaacaacaaccaaagtcataaatcagcagcagtgaaagaagtagtgattttgatcgaatctattgaattagctgttggccttagccaatacaggtattggaaagacctttttaatatctatttgtccccctcatgggaatgtgataacaatctcattacatgcccctaggaaacaaataatttaattgtttgcccgttaacatacaacctgtttacttattaattactggcatagctgttcatgctagattttttgtttatttctgatgtgaattgttacaaaattatgttcacattccttagtttttataaacaattatgtctccttagagcttcttgatataaatttgtcctcagaattgttgaaatgctttttttaatcaaatattgtcattatcccacaaggaagtatgttacagagtttcacagaagttgcagagagctcagatattcttccctctcttaatctctgacagttaacacttttactaatacaactcttgtaataagcagcctggataaagaacaaaaatctcaaattgctccaagcgtaaagacagtcatcatcacttacattaggagttaacagattagagatcttttgtaaaagattaatcggctgaatttggttactcctgtattacaattttatgaggagaataatagcaaatgtaagaccaaatagacatcagcttggtgctgacccatatacaaaccatccataaaccatatattatgaagtatgttcccttgatttgaacaagacttgtagcattgccttggccaaaagaatcataaaatattttcacaatttaggggtttttcttatgataccataaaggaaaaatgcatcaggaacccccttgaaatgtacattaataacttagctttgctgtaagacaatacttggaaaacatcagtcctaaggaaggttatttcagaaagatatgagacattgagcgaggcaaagcattaaggtgaaaactactttgtttagccaatacaggcattagaaagacctttttaatatctatttgtcccccttatgggaatgtgataacaatcttaacaagttaagtgtggaaattgtgctaaaaaataactagcacaggccgggcgcggtggcttacgcctataatcccagcactttgtgaggcggaggtgggcagatcactaggtcaggagtttgagaccagcctggacaacatggtgaaaccccatctctactaaactacaaaaaattagccaggtgtggtggcaggcacctgtagtcccagctactcaggaggctaaggcaggggaatcacttgaacccaggaggtggagatcgcagtgagtcgagatcgcgccactccattccagcgttggtgaaagagcgagactctgtctcaaagaaaaaaaaaaaaaaaaaaaaaaaagaataactagcacagtaacagaagcatccaaagggtcaccattcttggagatttctgatacatttccccttctcccatcctgtgcagactgatggtcccttctctttcccattcacaaaaattattacaatgcttctgttcacaaatgtttgcttttctcctagaataaaattaggaggagaaatgttgggttgagagaaattgggagcatttagaataatgttactctgcactgagagaaaaatagactcagcaatttctagaaatatcaaggtttcaagaaattactccttaagtgaaaattaggaggcaagaagtggttctacaaagtcagtaaactctagttctgtttggaactgtgaaaaaacacagtaattaactctatgatgattattgaattgtgacatattccaagatacatttattgtgtttatttgaatgactaaagttaatgtgaagtataactctaaagagacataacaaatagaaattgaaaatgtacagtgcctatattctgtacctggctctataaagaataggcctttgtatttttcaaataatattgggtgtaaaaagcgcttggaaatatgttgaaagggcagagtccaaggtcttctcaccagaaattctgatacaggtacccaaaatcattttgatgaccatggctaaggaatatattgtgacaaagacttctcttaaaagaagatttctaagaggcaattttcaagagagaacaaatgattaaattcattgttttcacagcaatgtgattatggcagcttagtggcagatgttgacactccatgtaattaaaaatttttaaggcaaaatacaataattagtcctttggggtaggaaagagtaaataaaagaacaatttcatttttttaatgaacaacaagcataaatatggtaatagtctctagttagatttaaaaatatattacattgaaaacagaaattccattgaaaactgacatattaatctatcattttgctagttaattacagaatttgtggctaaacaattttagtttttatgcttattaaaagtagttaatctatgttttctatgacattttacattgtaactttcttcatggttacaacagaaaccttagagaaataaatcaacaagtcagtcagtcctaacttttcattattaacgactagggaagtttctgactctacaatcataactgtgtgtgcacccactcattcacatgtgaaagtgttcaccaaacccaaataataatgtatttcagcagcaactttaatcatctttaatcttttattataaaagaataaatatgttcagtctatgagaacacatggacacagggaggggaacatcagacacagggaggggaacatcacacaccagggcctgtaagagggtggaggctgggggagggatagcattaggagacatacctaatgtaaatgatgagttcatgggtgcagcaaaccaacatggcacatgtatacctatgtaacaaacctgcacgttgttcacgtgtacactagaacttaaagtacaataataaaaaaatatatatatgttcagtctaaacactgtaggaacaaaaatatcctgaataaatcaaagatgaagaacatcttggcttttttttctcttggccatagaatttataagccttacttgcttttcttccccaataataactcttccatttttctaggagaagcccacacactaaagaaagagaaaatacacaactgtttgttcacaagatattttatttattgatttttatatgggttcattgcaactaaaagatcgggacatattgctaaaaagttttctatgtgggatctctgctgcttctttctctaccctataaagacagaatcgaatcttggggcattgtttctcagtgggaatcataagcataacctgttagtatttttaccctgaaccctgaactacacttcaatacttttatctcttgcttagccgggcatagacaaaaatccacagtgatattttagacaaagaacgtttttacctcagcagagacagagacaaagacagagagacagaaggagacagaaaaaatattattcacaggttcttttttccttttctcctagtggtttgatataacagagacactgcctcatcatacaagttttgtgaaattcataatgcttcattatctcagtcagctttctcttcattctgttttcattttcacagtagctcatgtaaataggttgatcctgctttgcataagcatgttgatttatatgaatgctattttgatctcaaattgattgaatactaaaaagaaagtctaggaaaaagagtaatgtattatgaaggactcctgccaaagacaaaatagcctgcatacattccctattagtgatggggaattttgaattgcctggttttcaaagagaatatttccaaggaaatatagcaaaacactataatactgaggcccaagtgtttttaaaatccagggattaaatcacattttggaactagaactccacctagtagaagttcacgtaacacaggaaggctgagatttagtacaatctacgacactaccattaaaaagccttaatagtatttatgattctatatctacattgaaaatgaaagaaaagttaatgttcataagccagagccagaactgtgctgagcacttgctatgaattatgcttatttcatctcattttctttcaacaccctatgcctgcactacttccatctcctattggtgcacagtaattaattggcaagttgttgaatttttcttttattatacctagttgcactttcttcctcattttcctccccatccattgtagcctgaatttaaattctgcctgcgctcaaatcaccaaccaaagttctgctcttggcaaaaaacgtcatatcaatatttgcaccttactttgcattcctttgtcaagaatattgttttaaatcttgtcattcattgtgtaataataggtgtcccccccaccacttcccagaaagatatttgcagtaaaagaggttgttctggggcacagtgaggagacaggaaccctcctcatcagccctgaagtctgacttcttcatgaataacctccacctcccctccctagtgtaagtctgacctcacctatttctgaggggactctgagagcagctgcagttgtattctgatggatggactctaacttccatgaaatctggctctcccattgctagctccttacttccctgtgcttaccaaaacaaacctccctcacctaagacaacttgtacatgtctatccatccttgcaagctaagacaccttaacctaatctagaattgcaggtattcgtctatggacaagtcgtttaattttcatgattctgactattttatttatgcatatggatggcatacagaatcaaaaaccctgctcattgaaacaggcactggagagcagaattcttgtttcagcacttgtaacttttgtcaccttgaacaagatagtgaaattttctgaggctcaatttcctcacctttaaaaggggactagtaatacattctcggctcaccttacaaggtttccattggaaggactaaataagctgacataagttaaagtgctttgtgaaatgtagagtttatacaaatgtgagtgattattatgcaaatgatgagaggatgtatccgagctctaaaaagagcaggtgtatctatgtaagtaggttagttgtctcttttaaaaaatgaggctcctggcaatcctatcagcaaggggctggagatttgcatttgacagcaacctgaaaacaattcaacatcagaaaatttactttcacaaaggaatccggaaaaaaagaaaagtatgaaaaccactgataggagttgacctaactactaaaaatctgtctaatgtttcttctcttgaagatattattgatgcaaaagcaaagtaaacaaaaatgaaactaaactctcactgcaaaatattctcataggttttttctttttttcccccacaaatatctcctattttgaacattctgcatgctttttttttttttcaatactgcatgcctggaatgtgtgtactgtagaatcaaacaagtttttcagatttgtctttaaaagctcgggggcaaatttttagaaaatatataatgtagaagaaacacaatgagaaaaaaatttcctgaagttaggctttcacatgaaagcttactaaggaatactactactcctaaacacgcagacagtcttcttgtattgccatttagatctatcattctgattgatcactgtgtagttggctattattgggcctaatttaaccctatacactcacacatccatctactctgtctattgtacctgacattctacaaattacttactcatgcaaatgacgacctaaggcaaccttttaggatattcgtgtttaattatacaaatggttcttgataaataagattatacatcgttccatatgtttattccctccttgatgaaaggaaatttaattttcatgcagatttggtggggacaatgtttaagaattgctgagttttttgtagtctgcagatccatccagtctgcagaagctgacaaaatcactccacttcccacacagagatgagcagttttttcattaggcttaaatcaacgtgctgcattctgaaatcctaaacggccccctttgtgttcacatggtcaaaggcaaaaggcaaaaaataaaaataaaaaaggaacagcctgctctccttgctctcctgtgtgattacaaggttgcaagatcaaagtttatctcttcctgttgtgtttagttgcttttggttgccaatttcgttttttttcctttcttttttttttttttttcccagccttagggtatcttgcttttgacagtcttgttgatttctctttggaggtctgggcagtgaattctgcaggaaaagcccccagtagctggacatggtgcagaaccgggccagccccaccagaaggtctcagagcccccacgttccatgtgatctcttctacccaagcagtggtcaacatcagtgcccctgggaagcccaacgggatcgtcagtctctacaggctgttctccagcagcgcccatggggctgagacagtggtgagcagcagagctaaaaatccaggactggttgacttttaaaaatcattactatgaaacctttgtttttatgtttttgtttttccctccatctttcttatccttctgttctcagttgctctacggtgaacttagtagcacaaatatccctcagagaagaaaaagtgaaccctgaggaaacatacagaaagtatgtaaactcttagggagagggatgctaaaggtggtattaaagactccacaaacgtaagaaactaagactttaaaggcaatcacactaatttaatttaatttaatttaattagaaaacagatcaaccacttagagtggtggcacatagtaagaagttggcaaatggtaattattggtggtgtaaatgttagtatgaaaacaaaatagagcaaagaatatccttggaatctctattttgacatgcacaaatctctaataatacatggaaaactctcattcctctggtgatttcaagaaagttctaaccctttagaagagagagcagagcagctccatcagcatagccctagctccactgtttgttcgttaacacgtttgaggcacactgggagacaggagagattgctcagggaaatcatctttcacattgtgcgttagccaagccacttcccggaagcgatgctaagaatcaactagaccagttcctgcattatttaaatgaagataccagcagccagcacgatgaagactcttgtctctgtggtatagcttgtgtcactctcaagtttctcatgaataagtggagattataatactttgttcacacaaacattgtatagagattgtgcagatcctggtattacactatgcattatttaggccaatttagggaacaatttgggcaagtgtggagaattcctctgagaccagagtgtcaggtattgaaacacaatttcaacagataacttacatacagggaggcttggattgaatgttaaaggaatattagcatattttctatagggcttcgtactcaataaatatagatgatgtaaatacaatcaacccttgattatccatgcttataaaatgataataaactaaaataatttatatttggagggcattgtatgcattttttaacagctcttcttaatcatatgttctttatgtcaacatgaacattaatttcagtttctgaactcttgttccgaagagtacttattaaaaccacaatgaggttaaaaatttgctcaaaataaaccaaaactttataatcctacaaagatgattgagagaagactatgatattttgtaaaaaccaacaccctcagaggaagagatagactttcaagccctccaatacttatacctgattttaatgtagatctgaaaagattttttgactgagaaattgcatgcaagtaaccatggcagaatatggaccttggtgaatgctgactagacatataattggaaggcagattttgttttttgaaaagacatcactctgagggtcatagactttgatcaacactttgtgtgttccgtgccattttctaatacctttctaaggtaatagataatcgataatattatgccttgtgatttccatcctgctacctcaaacgtctatttaacggttacattatcagatttttcacctatttgtcatacctctctaactgagttggtaattttttgaggataaatgtcatgctaaatgccatgttgtgtctcccagagtgcctggcatggtactccatttgtaggaggtgggatcttggataacattcatcaaacacctttaatgtttgacactgcctttatctagccttccttccttccacagctatccgaaggcatggccacccagcagactctccatggccttcaagccttcactaactactctattggagtagaggcctgcacctgcttcaactgttgcagcaaaggaccgacagctgaactgagaacccatcctgccccaccctcaggactgtcctctccacaaatcgggacgctggcctcaaggacggcctccttccggtggagtccccccatgttccccaatggtgtcattcacaggtaatgggtcaggcagaaggatgaagaaactaacaaggcatgtgtacagacatatgaactcatggtatagcctactctgcacctaggctacaaacctgtatagctacctggcactccccagggaggacttgcttattgaacagatatctatagcaaagtagacaaacaaattgatttgagtggtaatgttacctgcgatgtatttaaatcataaaagcaactaatgatagaaaggagaacaacgaaatgttttacattaaaaagacaatgcaatgtgttcgtattcaatatgctcttcctaatggttatctggaagcattccttctaccagccttcactggaacataagatacctccacagttaaatcagaattgccctgatctaatttaaaatattgtcataaaccactgtttgaaaggaaaaagaagacacttgactcaaaatcatttagaaaaaaaattatttactctaaaaagagaagaaccatttatgtctctcctcttaaaagagggaaatgtcttatctctaccaaaaaggatcactagttgctgggtaaacagcaatgtgtgtgtagatggtgacttctcttatcatttctctggttacatctgctgctcgtttccaatagcattacataaggtgtttctgagagcagtttcctgcaaatggaaattttaaagagcctgtagctctgtgaaaacaaaatgtctcctcacaaaatagaactggttttaaaagagagagttaaactaattccattacccgtcttgactctacgtatccattctcattttagctatgaactccaattccacgtggcttgccctcctgactcagccctcccctgtactcccagccaaatagaaacaaagtacacggggctggggcagaaagccagccttgggggtctccagccctacaccacatacaagctgagagtggtggcacacaacgaggtgggcagtacggcttccgagtggatcagtttcaccacccaaaaagaatgtgagtataagtggctgctaccataagccagagagattggaatgtggtcaggagaagcttgccctgaaactcggagaagccacttttaaaaacagattgagtgggctcaataacactgaatgttactgaagcattgatgaggatgactactgaggaaaaatgcctactggatttaataatatggaagtcaagggaaaatttaagaaggattttcttgtggggatagggtaaaaataaatttaggggaagttaaacgatcaatgggaagaaagaaaatgaacaaacactggtagaccatttttataagaagttttgctactccttttctttgtaaattacatggcataatctctagtatgtccagagagcattgagacatagcactattaggaaaagcaaaagggcaagtgagtgaaggaaagagcaatcaactaattaattgggggcttccttacatttttatataatacagtcacgcatcgcttaacgatggaaatatgttctgagaaatgcatcgttaggcgagtgtcgtgaaaatatcatagaatgtacttgcacagacctacatgttataacctactctgccccataggcatgtgactgtgctgaatactgcaggcaattgtaacacaatggttatttgtgtatctaaacatagaaaaggcacagaaaaaatctgatataaaagataagagggccaggcacagtggctcacgcctgtaatcccagcactttgggaggccaaggcgggtgaatcacctcaggtcaggagttcgagaccagcctgaccaacatggtgaaaccccatctctactaaaaatacaaaaattagccaggcatggtgacacatacctgtaatcccagctactcaggaggcttaagcaggagaatcactttaacccaggaggcagaggttgtagtgagccgagatcacgccactgtactccagcctgggcaacagagcaagactccttctcaaaaaaaaacaaaaaatgtaagagatggtacagggcagctccattataatcttatggaaccaccatcatttctgcagtcttgctcaaaatgtcattatgagatatatgactataacttagattttataaggtatatgctttcattgtttaataatggcaaacacaaaaagtattaagaataataagtgcttatcagaaccaactgcataatttatggagtccagtggaaaatgaaaatatggaatcctttgctgaaaaatctttaagaattccaagacagtaacagtacagcatcaggctaagtccaagactcttctatgtcacaggcccttgcaacagcacaggtcacatgccaaggaagctggtccagcttattataccccaacccagaggcaaccactactaatattttggcataatcaattcttttaatctcctttctatgggtaatttttactatatggctgaaatactataactaaaatttcatagtcagctttttatacttgacgttattgtatttgcatttcccgtggcattaaaaaaactctttagccaccaattttaatggctatacaatattccatatataaattaattgggacattttgttttttttttaatttcccattaataaatatgatgaaaaaatctttgtgaacagatctttgaatgtctggttatcttcttaaattaaattttgacaaatagaatttgctattaatacatcaagtattttaatattttaaggctttggatactagtttcatgtttgctttcaagaaagattatgtcagattataaatcttacctaaaatactctatctggcattgaatatgatgccaattttaaaagcaagaattacgcattcataaagaccaatgtctcacacaaggagcttaatgtgtctgagcaacaacatggtaggatgttagtaacagatcacatttacagaggacttgtttgttcctggcagtattttagcattttacaaataattcttacaacagacctattattatccaaatttacagatgaaaaaactgaggcagaactataaactgtgtactgcgattccaggatgccattcatatagactatgatctgaactgaggctcttggagttagacagtgacgtggccctaaactaaggccagagcttaagtaacctggccagtttccacatctagtaagtgcagtaattactctgaactcatggtcactgagctcagctgctgtctcagtactactctttccctgatcaattcatttcctactctctgtaatcaagacttcaaaccatctccaccttcgccaaacctccctctgccgctcaccctttctcccttcatgcccacaacccagctcacccatttctccctttattctctgcagaactccttgtcttgtaattttccaggaaaagagatgtcttcagtcagtaatttgctccacttcccactgcagacaaagctacctgcatataccccattgctgtcagtgacaaggaaagggtggtccttcttccgtctgaaataaacctgccttccatgcagtgaacttcatccacttcattactcaccatcccttctctctccttaatctttctgtgtatctcactttgattcaaagttccttctacccttctaatgttaaagcaaacaagctcctcttcccctgcagtgatgtggactctactctctctgacagcaaaactttcctgaggaacggtctgcagatgctttgcccatatcctctcttccacttactctttaacttcctcagcactggatgaaaatccctttctaagtttgcctttggcctccatactgatatatccagaaggcatgtttctccaggagtcaccttcactgactttccagtagcattcaacgcaactgaactttcaatgttcaatccttttttaaaaagtggtttaccctcattttcattaccaccctctcctggtttctcctctacttctttggattttcatttttagtcaactttgttggttgatcttcttccgctgcccaaatcttaatcctaaacattttaactttgtccccttgccgtttctctactccctcctttcctcctccctcatcaggtgagttcatctgctccaaggctttggttccaaaagccaaactccagtggtcacctcctagtcaagtgctctgttttgaagtgtatacccctccacccagattcctcacagacatctccctctgaatttctcataaccagcttacattggacaggccccagacagagcttgcaactttccccttcaagctatgcttcctttagtcctcactttctccattttcatctccagcactgggcacagtatcttagattccaatcaatgttgtttaatgaataagcgagtgcacctaacactgcatgtttattgttgacactgctcaatcagcattttttgtcacccatactatattcaaagcaaactgtaatgattcttaatgtgtgctgtctgattttgtaatctcctttgcactacatccagaagccaattttgctaaatgttgcagttttttggttgatgtggccagaaagccagagaacagctaggtgagctttgtaatttataaccaattcccttttgagtcatgaagcttagcttttgccagaattttttttttcttatgcttggaagaacaaagtgaactgatttaagattttcttcctgtggccaggcacactggctcacacttgtaatcccagcgctttgggaagccaatgggggaggattgcttgaggctaagagttcacgaccagcctgggcaacatatcaagacacctatctctacaaaaattttttttttaaatagccaggtatggtgacatgcgcctgtagtcccagctactcagaagactgaggcaggaggattgcttgagtcctggaagtcaaggctgcagtgagctgtgatcatgtcactgcactccaaccttggcaacagagcaagacttggtctttaagaaaaaaaaaaaaaggattttatctatttgtgtttttttatattggagaagcagcttaaacctggactagcaccataggagaagaggttcccttaatccactactgggtcaatagttacggaaaaatacaagaaatgactatgatacaggttctaaaataccacttatgctacttttaactcattataaatactgggagcacgaaaacatgcaccagagaatacaaaccagaaaataatttggggcctggtgtggtgtctcacgcctgtaatctcagcactttgggaggcagaggtgggcagatcacttgacgtcaggagtttgagacgagcctggccagcatggtgaaaccccatctctactaaaaatccaaaaaaattagctgagtgtggtggcacacacctgtaatctcagctacttgggaggccgagtagtgagaatcacttgaacctgggaggcggaggttgcagtgagccgagatagcgccactgcactctagcctgggcaacagagcaagagtccaactcaaaatagtaaccataataatttaaaaatagaatatgcagttttatatagatgtgatcacatgtacactcagcaacgggtctggagaagaagcctaacaacacatttagttccctctgcttgaatcccccttcagtggagagagaggtgaggtgtaaatgtttaacagctggcctgcttgagggaaaaatggcctgatttgaagtgcttatcagtttccatggtgtgaatacccccattactgctctcaagtgaccaacatgacagcactgaacagagttaggaagggatgggttgtagcgtatcattatataatatttccaccagccagatagagtggatgtaaatgacctcgagcacacagacggtagtaaaatgtagtgaaacaaataaaaagttatgaatttggagtatttataagctttgttttaatataatttatttaagtttatataatttaatttttagtagtggccggatttaacaatgactcacaaaattcctgaatatttaacagttggggtgagccaacttcagcacaccactggagagcacccatagggtgaattggtaaattctgttcttttcaacaaatgtgtaccgatgataacaaagtagcatgggccttatttaagcaagcctaggttcagctccttggtctcctaccagccactgacatagagcaagatatttgacctctctgaacctgagttttctcaccccaaaaattaggaatcaatctttacaggattattttgaggattaaatgagataaagtatgtcaaaagctaggagcgtagtggtacttacagctttttcagtcttccttggggaggatttgtaaactcattattctcgattattttaattgcttactctttttcctcaggaaggtctccaaaccctacaggacaaataagactcctatctttctattttcttgctagttacaagctgtttctttatctgtgctgttatgatatagggaaaaagtgaaaatctactgaactaaggtgatggagagaagtcatagacaaataacaatagagtattccttgtgatatcaggcagaatcaatgttggaaaagcattgagatttaaagagggcttgataactcttgttttggtgtttgcagaaaatttttcttatggctttatgaaaatatcttattttgaaagataacaatcaactgtgtctttacggttgaatattacaattacaaaagcataattattccttattttgttatatttcctaacatcagaaatagatggattgatttttaaagaaaaagaatcagattcaatttagtctcactactcactcctttcttttcttaaaagccaatttggtatataggtgaatcttaatgtttttacaaatatattgattattttgtagaaaataagatctcatgaaataaatctcttctgacttgacaagatgacatggtatcccttcatttgtttccacaaaaattattcatttaaaaggtgagccccagttaaggattttctttttgttttagtaaggaactgaaaaatcaagagaatgtgcctgtgaaatgcacacaaagttgcttctatatgtgatataatacttaggacacctgagcttgattatatactaatgtactatgctattgattgattagtcagggccatgaattattatacttgaattactgtttgcaaggctttttaactatcttagaaaacaaactaacagtttgagaaaaagctttaacaataaatgggtgccaaaaggacgtaattcaccatctaagcagtttggtttggagaaaaaaatatattaacttcatctagtccttggggctttgtggcaataaatattgatttgatatgaaaaatagctatctactgtacttaatagtattaaggatactttacctgttaaaaagagggaaaatgcaacaaaatatgagctccagggttatgctggtgagcagatccattgtatgttaatagttttatttataaaacaccactctctatcgattttttttaaagcaggcataaagttgctgagaaagcatttcacacatgttcccattggttttcttttcacccctgatactggttgtttcgtaatactgaggaaaaagtgaaggattctagcaatgttggttttcttttttttttttttttttgtttggattggttcggtttgattttgctcatattttttttttttaaagtgcacacctgcactccttcaaagaggttaccctttttagaacatacaactttctccccacagtgcctcagtaccgagccccattttcggtggacagcaatttgtctgtggtgtgtgtgaactggagtgacaccttcctcctgaacggccaactgaaggagtacgtgttaaccgacggagggcgacgcgtgtacagcggcttggacaccaccctctacataccgagaacggcggacaaaagttagtttctgactcctgtttctcagtgtggaaggcgctctgttccccagctttacgggatgctaaatctgaaagctgaccagcagatgctcaccattaaaatgtcttggtttaagtgcccccttcttgtgaaaaagttactgctcaggataaataaggttttctttccttcccatttgcagcttgacagcactgcagttataatgcagttcaaggggacagcgctgcctccacaggactggagggtccccaggaagggataagacccaagggccagttgggttcacaaaagaaatagcacccatacatagtcaatgactaccctaaaataatacacttctagcaacttcatagattttcttgctgtatctccagtctccaaacagagccctatcaggaaataactatctccaactcatgaggacctgaataaggggtttccttaaccttccttgatatcagcccctgaaagaacaatcttgaccctctaaaatggagttccttcttcctgtttacttacatgtcccttttctccttgccttgtttttaaattgaaatgagaaaatgctttacaaggtgctaagtattttatagtgatcagcatgctcacaggaccaatgttcactatataatgaattgattaatgagtattttattttggctgtaaggtagaggtaaacagtgagctccagcattgcatgtatagtaatagaaacttaataacatttttacaaagattcagctacacatgttcattgttacagttcatggtcacctgggcagctctttgggaaaggaaggtggcctgatggttgggagacacaggttctacctggccaggcctataaccatctgtgtgaccttgcaagggtcacttccctcaggttcctggccattggaagagcaatttagaccatgtgatttctaggatcccttttgagctctcctgttcagtaagaaactctaggtcatttagtggaaagtacacctgtaaattttaaaggaaggatttaaaccgtgtgcagaacaagatgcgctttgtgtattaccctttactcgtctgatgttcttttcctttgctgtataagctctaattttccttagctctattacttatggataggctattattacactaatgatagctttttttcttaaacattttaaaattagaagtaattttgaatattatataaaacgtcataacttgctttggaatcctatttttcatgctatgatgcattgctcttttaaaagcatgtgccctatttgtaggtgttgaatgaacaagtcatttaccagttcttccttttgtctagccttctttttccaggtcatctgcacgactgacgaaggaagtgttaagacgccgttgatccaatatgatacctctactggacttggtaaacaactcatattatacttggcgtagcacctattcatcttcctcaagaaacacacatatgtttgtttatacatacttggagtcctaatatattagcatagactatacagaagaaattgtgccaagtgttgtcagagtttttttttttgttttttttttgttgttgtttttttttgagacggagtcttgctctgtcactcaggctggagtgcagtggtgcaatcttggctcactgaaacctccacctcctgggttcaagcgattctcctgcctcagcctcccgagtagctgggattacaggcacgggccaccacacctggctaactttttgtatttttagtagagacatggtttcaccttgttagccaggctggtctggatctcctgacctcgtgatctgcctgccttggcctcccaaagtgctaggattacaggcatgagccactgtgcccagccagaaattttttaaaaagtcctcatggaacttatatcaggcaaggagttacaatacactctttttttttttttttttttgagacagagtcttactctgttgcccaggctggagtgcagtggtgcaatctcagctcactgcagcctctagctccaggttcaagcgattctcctgcctcagcctcctgagtagctgggactacaagtgtatgtcaccacgcctggctgattcttgtatttacagtagagatggggtttcactttgttggccagggaggtctcgaactcctgaccacaggtgatccacccaccttggcctcccaaagtgttggaattacaggcgtgagccactgcacctggccagaatgtactcttaaaatgccaaatattgaattgtaaatatggaaaagaccagagagctcaaactaaatttttctcctaaccacaaaccctgtcaataaagaattgtatgacttcgcgtgcataaaggtgatttacagaggaagttagaggagagatcagaagaagaaagaaaatattcagccaattcatgttgatcataatgttaatattctagattcaaagcctagaatgataaatttggaaagtgtcttttattctccataaaagattatgattgactgttgatatcgggtaatttagctcaacgggtacaattttaatttttaaggagcatcttttaaactgagttttactcatagtctctgaatctaaatttgtgatactttataaaagcaaattagagaaatgccaaatcttttccactaaaacagattcgggattgatatcctattttaaattccagtaattaatgatatatcaaatttgcatgtatagagtttttttttgaaaaataaacatgtccaaaatttctgaaacacaatttaaaaaaaaaattttttttaatttttttgagacagagtctcatacatgatgaaacatgtatattattgtcaaggatagtttcaatttgtaaaaataacgtattattctatgtttccaaactttacatgtctggatgtcatataaaatttcctacaacacttaattcttctcatacggcttatttcatttaatagcagtggtaggatagaacagatctcatttagtattctgttagcaactccaatatttccccaagtggacaagtggaggtataagggacacaggaatttatccaggaatgctctgctagcttgttactgggatgagaacaccaacacagattttctattgacttctggcctgggactttttctttgcaatggtttgccaagttaagtacgcataggaatcacctcatgtgcttgtttattgtagtttcccgggcctctggcagagattcagactcaaggaggctcagaatctgctctttaaataagtcctgtccagtgattctgacacagggctcagaaccacgtgttgagtgatgccggaaaaccaaggttgctcgccttctaagccctgccagtctagtttccttggtgaatgggaagtgtgttgttcctggaggcaggccatcaacagagacggatttactctgacactggctgtggtttcggttttctttggatctgaggcccagccaccagagtttcaaaccctgacagtgaacctcccatgtgatgcacaggtagagtcccttaaggtgaaggggtacttcaaaaagacagaagggaagggataaagggacaccatcctgatctcgaggtcttcataaaaaggagaaatcccccgttggctcatgaatacgaattgaggtttccactgtgtctggaggccgggctttgggtagagcagaggggaagaactctgaggattgtgcaatgctctggcagattccaagatgtgctgcccaactaatatccatcgtcagttctaattttcatgatgtaacttttttaaaaacattcctgttcccttgcctgaaggcagcctccaagcaggagagtggcagagacctcattttcctctgactgttctaagggctatttcccttttgaggcttccctcgggcaggctgccctcccttcccctgcgtgctgtggagcaaggggcccactgggcccatcagatcagtttctggagttacagccaacaagttgttttctctctgtgccacacacagaggaaacaactcttttagtgtgcaacctaggctggtttgtttttaatcaaacaacacacattggttcctaattaggggaatttcgacctgctggagcttgattggagtgttgactcaaccctttattttagagatgagaagcaaaggtcagagtccaacatttaatcacagagctgatcggcagcagagttagggttggcaaagtaatatccctcctcttacggagttcaaagtttagttttagtcaccatctgttcctgcctttaatagtttcaccccagttctgaacttttttcctttaagtctttccctgctagtgtgagtgtgaagtaccacgcaggcccatggagttctagaggtgttgaaaagggggagatttgtccagtgagtgagtgggctttgcagttgtgtctgcttgttcttctgacctggctgtgggtattagatttagatgagcagctctctggctcacatctccacaccagcctgtgtggccgctgcatcagatccacaggtttctgtgctggccccagcagtggctggatgggagcagatctctggccaccccacccccacccctgccgcacccctgcttagcttgccaagctgacaacataatttcactgccttcgcctatcctgcatgattcttgtcagcctctctcctatcttccccacaagacttaataaacctgcctggctgggtgcggcggctcatgcctgtaatcccagcatgttggaaggccgaggcaggcggatcatgaggtcgtgagattgagaccatcctggccaacatggtgaaaccccatctctactaaaaatacaaaaattagccaggcatagtggcgcacacctgtaatcccagctacttgggaggctgaggcaggagaatcacttgaacccaagaggcagaggttgcagtgagcggagatcacaccactgcactccaacctgggtgacagagcaagactccatctcaaaaaataaataaataaataaataaataaataaataaataaaaataatcctacccacccttcatccctgtaaagctctaagcataggacctggcaccaggtacattcttgttaaatgtgagctacttttattaatactaacttcatgtgcagagactcacaccaactgaactctcaatgtgtgaacgccaagcaaaggtaagtggctccagtgctaaaagatttctttccataggaagctttcccagtgcatttgggtgatggtttgctgagctttgctctttaacagagaggccatgtaaagacaacatggtagcaaacacaggctgttaatatcataatggaaaatggaatctgatgcttcaaaatccagtttgcacgaagtatcaggaattggactgttgcatgaagcaagtacacctcagatctccaaggagtgattttgtttgtgactctgcagcaataatagtaagggtcccagtccctcatgagaatccaagcaaggactttgctcccaagacacacagctatgaaacaggtgaccctcaaggttactttggtaacctcttttaaaaattgctccccacactcccatctttcccagggatttgtcaagacagtggtgatttccaacctgagcagcagcgccagaagtgtcagcaaggcctctcaagggctgtaagcatctcgttataacccagcaacctgctgaaccattaccccaggctgcacacaagtgcaaacaagcagtaagagacaaactgctttctgctttcaactcctctctaatttactatcaaatagcagggccagagatgacaaaaatgctttctgaaataacatttcccctttctttctctgggttttgcaggcttggtcctaacaactcctgggaaaaagaagggatcgcggagcaaaagcacagagttctacagcgagctgtggttcatagtgttaatggcgatgctgggcttgatcttgttggccatttttctgtccctgatactacaaagaaaaatccacaaagagccatatatcagagaaagacctcccttggtacctcttcagaagaggatgtctccattgaatgtttacccaccgggggaaaaccatatggtatgtttgtagaggtgtggccccatttccctatcactggactagaatacttgttttccttctgagaaaaatgtgtcatagccatggtaacaaggaattagatgtaagttatgtttcactaagtgtggggaccaagagaggctaaccctagaacagctttctcaactttggctgcacattagaatcacctggaaagctttaaaaaatatcactgcctggacttcatccgagaaattctcatatccttggtcttgagtagggcctgaagattggtattcttttcttcactccaaaactgattttaatgtgtaactagggatgagtatctctgccctgtaattgtaagccagggcctggtggagaagagttgtatgttgagattacctggggaaattataggttgtattactgtgtaatttggtggcggggaatgaacattaaaaggcggagatggggaggaaggggctacagtgctagtggtgctcggtctgtcctctggtcctgacaccctgtgccacagaggatggatggctcctcttagctatagaccactcactcccaaaataggaggtccagtaaaggtctagtgggagagggccccatcacttggtattacaggacagtcattgcccagagcactcattgaagggtaaaaggtgatttaattccatggtgcagtctggtgtggggctatgtctacctggaggaggaaaggctgcgttttctaatcctcatcaggtacccatctgttcaccaaagctgggcgcccacagggctacgtctccctgaggaggtgccttttttccagtttgcactaaggttctatattagctagtggctaccctaggcagtactaaaattaagcacagaagcctggtcaagctgcttacacttcaacatttaaaaaaacagcagtgagtgaacacagcagcaccatctgccttccagatctcttcacttttccagcactcagcaatgaatgaccactggttaagccccaacatagctggatcagacctaagtagcaggagtgttgggagcacaaaagggcagtgggccctccgaggtccacggtttgtggtttttgtgggaagtagcaatgggacaatgacgtggtggtggagaagcaaagaaggcactgcccaacaccatcagggccttggctctctactcacatctgtcccactcctctactcactcatcctcctcggagcctccttcctccctgagcccatcagacaagctctaaccacagggccattactgctgctgctccttgggtggctcacactcttgcttcattcacatctctgcacaaatgtcacctcccattctatgtaaaatttcctagccccttaacccacttcttttcttttctatagcatttaccacataacactaagtcagatatgtttgtctgactcctgaaatagaaggtaagctcccaggatcaatgatcttgtgggcctcttcctgttgtatgtgccccgggacccagaacggtgcctggcatatcataggcactccacgaatgtttgttgaatgaatgaatgtcgagtgatcacttcgaaccatgggctgtttgctcctgttcagtgaatagtcattaggagattctcactgaagagcagatatttcaaaatttttccttgttaaagaataactttctttaaggagcccatgttcctagaaggtgcactgctgctggaggaaggcagtggaagagagaaaagaaggcaggagagatctgtttagcctgggagatgagctaaactgaaactagggtctatggagtgcatggagtggtgaaagggaggttcccaagcactgctaggcacatctactgtataatgtgaggtgcggttacaggaaagtgtacccacataccagcaatgtccagaagtcatttcagtgatactttctcctgtcctttgacccagtccctataggcaggcacctctgtgtcagaatcctccatgaggaagaacactgtcttccttacttggttaacttagtgaccagaagacactcccatcattcttgtggagatgttatgttactctggatataaccccattgctcagggttttaatgagtcttgttaagcttcgttttgtcaaagtgaggaccatgaactatctgcatcagcatcacataggaggagcaggacctgaagttctgagggagaaactcaataatctgccattttaaccagaacctcaagaagtctgggccaggctcggtggctcacacctgtaatcccagcactttgggaggttgaggcaggagaatggtgtgaacccaggaggcagagcttgcagtgaaccgagatcacgccactgtactccagcctggacaacagagcgagactccgtcacaaaacaaaacaaaacaaaacaaaacaaaaaaagaagtctgatgcacagcaagatttgagaacagctgaaaatgaaataataatataatacaaaacctgtatgcagtgtactgtttgataaccagtagaaacaggtggtgggagggtgctggttagaccttgctgtcctgacaccacacaggctaagccgcctctggggacagacttaggcttcagctgagaaaagcggacaaaagaatgtaaacaccctgttcctgcacaccctttaccatcggggaaatgcacagtggcacccaactgattctttcactgagtggccaagactgagtcaggtgtgaggatgggaaggcatagagggactggctggctgccaggggctctgggcccagggaactggctcatcctcagcagggaagccattcattgcaggcaggtctcagcagaagtgaaatctgggatacaccagggcaccgggtggaattcccctgagcctgttgaatcataatttaatcctatccagttgacagtgtatttgcaagtcttcttctgttgctttttacaaatatttttaaaccaaactgctctcacaaagttggagaccatgagagacattgtcaaaaattagccaaactaaagagagtacaatttgtattagtagagcaaaatgaagtccctgttggtgactgtgggctcctcatctactcaggtgggaaagaatccagtcaaggggaagaatctgaataggaacaagccagattcacctgctcagttttccagattgactgtcttttcacttgagtaggtcaatgagctatgcccctgcaacacccacccacacacacacacacacacacttctccccctcatgtgacaagctctggtttcagtgctgctgtgaccctcttccaagcacccgtcttgtgaacaggtaagataccctttgaacatcagacccaaactggcaaaaggattttaggctatactctgaatggagagaaataggcagaggtgccaaggaatgagagtgtcttttgtatttcatcaacatttttcaagaccatacagtatacagtatagctaagtttaagttttgcttgttatttaattactggtttgaagatcctttcattccctgcaatactaaacaaatactggcagtggtacttaccttagacactaatcaattaatttccactcaccaaggtttttttttttttaatttgtttgtttttgagacagagtcttctgtcatccagactggagtgcagtggcatgatctcgactcactgcaacctccagctcctgggttcaagcgattctcctgcctcagcctcctgagtaactgggactacaggcgcccgccaccatgcctggctaatttttgtatttttagtagagacggggtttcaccatgttggccaggttggtctcgaactcctgacctcaaatgatccacccgtcttggcctcccaaattgctgggattacaggcatgagccaccgcacccggcctcactatgaagttttagttgcaaaacccaactttctctctctcatatatatatatatatatatatatatatatatatatatatatatacacacacacatacacatacatatatattcacatatatatgtatatatacacacacacatatatatacacacacatatatacatatgcaggtatgtatcctaggatatatatgtacatcagagcagtattaaatatgggtatgataatgctgtcattggagaaatgcaaggaatgtgtttaaaactgttccaaacatggactgatgctgccatttgttctcagtttgactctgtggctgatatatctgatgtgtcaagcaatgtcaccctaaaaagttacaccatgcactttgaggtacctctgtgtgctgcatgaatgcatgatcttttgcatggtgtgttgactgcacagtgaaaagcaggaacagatcattgatgacttccatatatccattccttggaaagctgaacaacatgagtgaaaactctactgaaaaaagaaaagaaatgggaggccgaggcgggcggatcacaaggtcaggagatcgagaccatcctggctaacacggtgaaaccccgtctctactaaaaataccaaaaattagccgggcatggtggcgggcgcctgtagtcccagctactcgggaggctgaggcaggagaatggcgtgaacccgggaggcggagcttgcagtgagccgagattgcaccactgcactccagcctgggcgaaagagcaaaactctgtctcaaaaaaaaaaaaaaaaaaaagaaaagaaaagaaaaagcagaaacatttcattgattggaccagctaaatcagagccctcagatatttagagcaactatagtttatcttacggcgcgttctaggtctaaattatgtagtgactttttctctctgatgttaatatcagacctgatgtaatttggaggctggaatcctataagaaatggaggaatatggaatgagaaatgagggagggaggagtcaatttccctacacaaatccaggacttttaaagtgaaagacaaacggagctcacatagtggaccaccatgaaataatattgttatctttggctgttctgggggaggagtgttctcaagagggaggctctgtgctgacatgtatgaagaagataccttgttcacccatcatccgtctgccttgccccaccactttgcaatgcagcaagcccttgccccacagggaacaacagccagagcaccagtgcatgagctctctaggtgccgaaaacactggccacctaacttgagtattagctcatcatctcatccttcttaccaagaaacccagggtcaccgtgttgtgggtgctcatagctgctaaattctgtaggtgacagttgttcccttcattgacaatgtgacaattgtcaggagacagtcattcccttcactgacaatgtgtgagacacaattctctgtcatatttcaagcccatattctttatatgtgaaatactcacagcaacttccttctcaggggttagccgataccaaaattccccggtctgggacacctgtgagtatccgcagcaaccggagtgcatgtgtcctgcgcatcccgagtcaaaaccaaaccagcctaacctactcccagggttctcttcaccgcagcgtcagccagctcatggacattcaagacaagaaagtcttgatggacaactcactgtgggaagccatcatgggccacaacagtggactggtgagttggtttcctcatacagggcctttgctaaatatcccagaaaaaatattggtacagagctgcctgtacttcaccgaatgctgccccatggcactcgcctctgagcacttagccagtgaggtagtaacaaccggtttactaatgttacttcagttgtttgataagcagggtagaaactttgtcttgttcttctggtatgcaatagatgcttaaaaataaatgcttattggctagccgtggtggctcatgcctgtaatcccagcacttggggaggccgaggtgggcggatcacctgaggacaggagtttgagaccagcctggccaacatggtgaaaccctgtctgtactaaaaatacaaaaattagccaggtgtggtggtgggcacctgtaatcccagctactaggggggctgaggcaggagaattgcttgaacccaggaggtggaggttgcagtgagccgagaccgcgccactgcactccagcctgggtgacagagactccatctcaaaataaataaataaataagcagcaaacaggttatacttcatatacttggagcagatgacaggaaacattggaatgggcctaaaacaaggcataaaatacaagcacttgttttactaaaacaaaaaggtactttttttgttttgccttttcctattggtgtatgggtagacgcaaaaagaatattttgtatcaacaggtgaacatggttgctttccaaaaccttaggaaatgatgacaaatgagggtgttactatttataagcttcatctttcataatttcagtccagtgggtacaaatcattggctctttgaaaggtaacctcttcgtgatataacatttattatcagtctctgagcggctacaataacaaaaatcctagaatttttgccaactatcaaatttcattgtgctaacttcctagatgcccgctgcagtacctaccattccactgggcctgttagaaaataaacagataggccaggcacagtggcttacgcctgtaatcccagcattttgggaggccgaggtgggcggatcacgaggtccagagttagatagagaccagcctgaccaacatggtgaaacctcgtctctaccaaaaatacaaaaattagctgggcgcggtggtgcgcacctgtaatcccagctactcaggaggctgaggcaggagaattgcttgaacctgggaggtggaagttgcagtgagctgagatggccccactgcactccagcctgggtgacagagcaagactctgaaaaaagaaaaaaaggaaaaaaggaaggaaggaaggaaggaaagaaggaaggaaggaaggaaagaaggaaggaaggaaggaaggaaggaaggaaggaaggaaggaaggaaggaaggaaggaaggaaggaaggaaggaaggaaggaaggaaggaaggaaggaaagaaggaagggagggagggagggagagaaagaaaagaaaagaaacataaccagctaggaagttagctcctgtgtttactcctctggggtaaaattattcacctccacttctttcaatcatctgcttctgtttttggatttgctctcatctttctcctccaagttctcacttttccttcactgaaaagttgatgacttccatgaagcctttcttgactaatagcaaataataaagggagttcgctggacccaggttccctaacactatataaaaaaatgtaccatccttctggcctgttcagaatgattgtataatatatacatatatataatatgcattttaaaatcacaggctgtttgatgttgttgtaacctcaactacatgagtccatttcagatctaaagtttttaaaaggcagggataattatatttggttgaaacaatgaattgctaactgatcatttttgacatgcaaaacagcaattgctatacattcaacataatacattgaaagttcagatgaattattacatctaatcttcacaaactgtaggaagtaggttctattatcatcctcattttttacaaaaagaactgaggtttagagagatgagtgatttaatgagagattacacagctagcaattatttttatgggtttgggttcttaaaaacatcatctgactacagagctcctatttgtaactattatactgtattgtcatttttgcttgctttttacggtactaataatgggcaatgtgcaaagggactcaataacaagcttttgaaggtgccagtacttggcaagttatctgtttattataacattataaccaacattactaaccctatttgataaatacaaaatacagcacaagagtgggaagaaatggagcacaaatagctagcattctgcctcttccatttaccgtttgaactaaatccatatatatgtgtgtatatatatgtatatatacagatcaccagaggtcaggagttcaagaccagactggccaacatggtgaaaccccatctctactaaaaatactatatacatacatacatacatacatatatatatatagtgtatatatacactaaaatatatagtatatatatgtagtgtctatatagtgtgtatatatatactaaaaatatatatatatacccccagctaatttatttttatcaagtatatatgtacacacacacacatcccactctacagatgagtagactgaggcttctgaggcttaggttaaaatatgacacaatataaccctcaaatcacatatacattttgaattagtctatagttcatgtgtgcatgtgatgtgatcctttcaataagagaaatttaaggcaaggtctgttttagaccccaccatggtgttgagaataaaaaagcctttaatacttattactttttacacttaattgatataactataaattgatagcaaatactattgatagcaagtatgtagccaatgatgattggcttatttttcagtatgtggatgaagaggacctgatgaacgccatcaaggatttcagctcagtgactaaggaacgcaccacattcacagacacccacctgtaaaggatggaaacccagaagacgtaaccctggaatgcaaggtctgcacccatttcctcctgggttatcactcacacatcataaatgctgaaaagccattgtttattatcctataattctttaaagaaatgatgactgtttttgaaagtgttccttcctaatagaggtctaagaaatgatatttttctcatcttaaatgagagagaatattcatatgaaaatacttgatttgctcttattttgtagaagacaaagaagtatgtaattgtcacttggttctgtttggcagtgatgctcctggttaactgaataatcagtggcaatttcaagatggctcacagttgttagaagtagtaagttagttactggctcaaaaatgattctgttgaaaggatgtcactgctgttcatttctatctgccatttctgtcagggttgacacaatcctgcaagaatagttattctaatgatcacagctgctaaatgaatcccaaactttgcaccaggtcgacaaacttttctgaaggttctatttatttaccatacatagggttacttaccaaactttttgacaaggctgaaggttctatttatttacaatacatagggttactcaccaaactttttgacaaggcaacacataacttacacataaatgtctctgttcttgcatttatgaattttccaaaaatctaaggagtaaacagcttatttatacattttgaggagaaaacaaagtgtttcactaggaacacctctacttgaaccaatgtttttatttcatatattttatagttttgaaactagtttctcataaaattctgtcaattcactgaatatcagagaatactgacatcttcaacctagcacatttcaaatggaaactactgttctatttgcaatattaggctgcgtgaaattttaaaaggaaaaatgtatctgttccttctagcattaacatatatacatgtagagacaagactatacctatgtgtatatatatgtatatcatgtatatattactctgcactatatcccttctttttggagaactagccattattttagccacagaatcagtaagaacagatgatatgcaacagtaccaattacggttcaaaaatgtctgtcacctgctctagttggattacaaagtcattggtgaaagtcctatggcaagaaaaattttcttgcaaatcatccacataaaatcagatatttaaatttgttcttcatggaaaacagagtaagaaaacctcttgtcttccttcatccttaaaggtctttgtgaccccaggaaaatattgactctgtctaacacacaatagtcacaatactttttgtgaatctacaaccagagacaggcaaaaacttgtaaagtaagggatagtcttacttattctgcctgaaaacaatgtattaccccagggcccaacagtaaaagattgtggactttttgggtattgagatttcatctagctctgtgagagagcagctcctcagactgaccaactcctagacaaagtttgccaaccataagtgtcaaaagcacaggccagtattaagcagaagttctaccaccttattagaactgctataaacaaaagcatctgaaataattgtgcacatctggcagtgactgtagaaaatacgaaatatatatttctcgccaagtttttatactttctgaaatgaaaacataggattgactagtttactggtttttattcccatatgccgattctgggacaataaagttgtttaaagctggcacaaataagcattaaccaaggctgtgtccaccttctgtgagctacttaaggtatataggaaaggagtggtcacaaacttgcatcctaatccttggtggactcttctaagaatacagtttgctagtcacaaagaatagtctacaaatatgctttgctaggttcagaagattgagtttatcctgatttttgaaaaattaaccaggtatctttatcactgtgtatttttccaagcacagtataaaattttaacaacgcacaaaaaaatacagaactgcaggggattttatcttggatcattatccatttaatcatctaattagacatgaactcagttagctgaatcatttacattttgactccatagcttagggcagacagaagcctgtatggcttctgcccagaactctgtcccctgctacatgtctaagtttacttgtatttatttcagagaagaactctaagatgttgctttgctactttaagtggtattgcgtgccaagcctctattatacaaaccatgcagactcgcctctagagattctgattcggttgatctggggtgtgtggctgaggcatcagtactttttaaagcttccaggtgttctaatgttgagacccactgatgttccacaatctggaagaaatcatgtacaggaataatatgctatgcacagggactatgctccttggctcaccccttctcccttataaacaatgagcagttcttgatgaacctctttaaatttaaatctcctgactcacattttaccaattgtacatgccacattctcagcttacgaactaccatgttttgttattcttaatatcaactgtttggtaagagtacagttgtttttatacactctaagaaatgtgtttataatctactgtaatttccactaaatggaacccaaatattaatgttatggtaccatatactgatgtaaaaatcatgctggcatccatgaacacaccggtaaataaaacatagtccaagtggaagaattcattaataaggaacttttaattatgtcacaaatgaatagttggtttccaatgcacaaatatcatgtaaactaatctaaagatggtttgcttaataaatatttgaatgtgacc

SEQ ID NO: 2 - DNA, 1031 bp, synthetic construct
  source 1..1031: mol_type = other DNA
cctgaggaacagtttttccagtatatggagcatttcgattccatccagcatatgttctccacagttttctctgctctaattcatctgtgtttttcgacagctccagatggcgtgctgcctcccaggctttcatctgccactccaaccagtcttcaggttgtctggtctacaccagctcgtaataacgctcctggctctcccagataccaactccagatgaggtctggcgactccacccatggatttctagagtgagcattctactttgtccattctatcagctgggttatacaatatagacataacatttttgaagagtaggtcagttctcatttgcaaaaaatataggttaccttttaaaagtacaaaaaaaccccaaacaattagaggataatcatttgctttgcaaaaatatctatttttcatttatgtagcatttaaagtaggatttcttcccactgaaacttttcatgagcacatgcattacataaagcaatgaaactaacaaaatgatgtctgaactgtcgctaacaaattataatacctattctacaaatccacatggcagtcagtctcaatactactaggatttacatctcgtataaacacaagattacagactcagccaatggctacttattttaaaagagatctcatttgatggcagaaaattacaatacttaaatgtatgttgacatcctctaaaatttttttgtagtaagaaatttacttgcttttatttctttgaatgtcgaaaacttcctaattgacatttatttcccatacaggttattttccaatccttctgcatcgttaagctatgaagtgagtgatctccaaccgtacacagagtatatgtttcggttggttgcctccaatggatttggcagtgcacatagttcttggattccattcatgaccgcagaggacagtaagtggtctgaacaatacacagccaaatgtcttctacatagggagcttaaaatgtcttcaattttttccaaagcaaagaaatgagcctcccttattta

SEQ ID NO: 3 - DNA, 151 bp, synthetic construct
  source 1..151: mol_type = other DNA
ctccagatggcgtgctgcctcccaggctttcatctgccactccaaccagtcttcaggttgtctggtctacaccagctcgtaataacgctcctggctctcccagataccaactccagatgaggtctggcgactccacccatggatttctaga

SEQ ID NO: 4 - DNA, 143 bp, synthetic construct
  source 1..143: mol_type = other DNA
gttattttccaatccttctgcatcgttaagctatgaagtgagtgatctccaaccgtacacagagtatatgtttcggttggttgcctccaatggatttggcagtgcacatagttcttggattccattcatgaccgcagaggaca

SEQ ID NO: 5 - DNA, 39 bp, synthetic construct
  source 1..39: mol_type = other DNA
ctcctggctctcccagataccaactccagatgaggtctg

SEQ ID NO: 6 - DNA, 43 bp, synthetic construct
  source 1..43: mol_type = other DNA
gttattttccaatccttctgcatcgttaagctatgaagtgagt

SEQ ID NO: 7 - DNA, 29 bp, synthetic construct
  source 1..29: mol_type = other DNA
ggctctcccagataccaactccagatgag

SEQ ID NO: 8 - DNA, 33 bp, synthetic construct
  source 1..33: mol_type = other DNA
tttccaatccttctgcatcgttaagctatgaag

SEQ ID NO: 9 - RNA, 19 nt, synthetic construct
  source 1..19: mol_type = other RNA
  modified_base 2: mod_base = OTHER; note = uracil
  modified_base 7: mod_base = OTHER; note = uracil
  modified_base 8: mod_base = OTHER; note = uracil
  modified_base 11: mod_base = OTHER; note = uracil
  modified_base 13: mod_base = OTHER; note = uracil
  modified_base 15: mod_base = OTHER; note = uracil
ctggagttggtatctggga

SEQ ID NO: 10 - RNA, 23 nt, synthetic construct
  source 1..23: mol_type = other RNA
  modified_base 1: mod_base = OTHER; note = uracil
  modified_base 5: mod_base = OTHER; note = uracil
  modified_base 6: mod_base = OTHER; note = uracil
  modified_base 12: mod_base = OTHER; note = uracil
  modified_base 22: mod_base = OTHER; note = uracil
  modified_base 23: mod_base = OTHER; note = uracil
tagcttaacgatgcagaaggatt

SEQ ID NO: 11 - DNA, 17 bp, synthetic construct
  source 1..17: mol_type = other DNA
taatacgactcactata

SEQ ID NO: 12 - DNA, 23 bp, synthetic construct
  source 1..23: mol_type = other DNA
cttgctatttctagctctaaaac

SEQ ID NO: 13 - DNA, 80 bp, synthetic construct
  source 1..80: mol_type = other DNA
aaaagcaccgactcggtgccactttttcaagttgataacggactagccttattttaacttgctatttctagctctaaaac

SEQ ID NO: 14 - DNA, 68 bp, synthetic construct
  source 1..68: mol_type = other DNA
ccgctagctaatacgactcactatagggacagaagcgagggtctggttttagagctagaaatagcaag

SEQ ID NO: 15 - DNA, 68 bp, synthetic construct
  source 1..68: mol_type = other DNA
ccgctagctaatacgactcactataggggtgatgactttgagaacgttttagagctagaaatagcaag

SEQ ID NO: 16 - DNA, 22 bp, synthetic construct
  source 1..22: mol_type = other DNA
tggtcactttccaacaaaacct

SEQ ID NO: 17 - DNA, 21 bp, synthetic construct
  source 1..21: mol_type = other DNA
cagaagaccatctggagctgt

SEQ ID NO: 18 - DNA, 20 bp, synthetic construct
  source 1..20: mol_type = other DNA
tgcaatcccttcttttgtca

SEQ ID NO: 19 - DNA, 22 bp, synthetic construct
  source 1..22: mol_type = other DNA
gtttattagcagtgccaggagc

SEQ ID NO: 20 - DNA, 20 bp, synthetic construct
  source 1..20: mol_type = other DNA
acctacacagtcctcttcgc

SEQ ID NO: 21 - DNA, 20 bp, synthetic construct
  source 1..20: mol_type = other DNA
gtggttcaggcattcggatc

SEQ ID NO: 22 - DNA, 51 bp, synthetic construct
  source 1..51: mol_type = other DNA
ggggacaagtttgtacaaaaaagcaggcttcagggcaggagaagggataac

SEQ ID NO: 23 - DNA, 50 bp, synthetic construct
  source 1..50: mol_type = other DNA
ggggaccactttgtacaagaaagctgggtgatgctgaaggctgtctttgg

SEQ ID NO: 24 - DNA, 20 bp, synthetic construct
  source 1..20: mol_type = other DNA
cggaggtcaacaacgagtct

SEQ ID NO: 25 - DNA, 20 bp, synthetic construct
  source 1..20: mol_type = other DNA
aggtgtaggggatgggagac

SEQ ID NO: 26 - DNA, 20 bp, synthetic construct
  source 1..20: mol_type = other DNA
gtctcctggactgagcctga

SEQ ID NO: 27 - DNA, 20 bp, synthetic construct
  source 1..20: mol_type = other DNA
catccagaagaatcggagga

SEQ ID NO: 28 - DNA, 20 bp, synthetic construct
  source 1..20: mol_type = other DNA
accacagtccatgccatcac

SEQ ID NO: 29 - DNA, 20 bp, synthetic construct
  source 1..20: mol_type = other DNA
tccaccaccctgttgctgta

SEQ ID NO: 30 - RNA, 19 nt, synthetic construct
  source 1..19: mol_type = other RNA
  modified_base 2: mod_base = OTHER; note = uracil
  modified_base 6: mod_base = OTHER; note = uracil
  modified_base 7: mod_base = OTHER; note = uracil
  modified_base 8: mod_base = OTHER; note = uracil
  modified_base 11: mod_base = OTHER; note = uracil
  modified_base 13: mod_base = OTHER; note = uracil
  modified_base 15: mod_base = OTHER; note = uracil
ctgaatttgatatctgaga

SEQ ID NO: 31 - RNA, 23 nt, synthetic construct
  source 1..23: mol_type = other RNA
  modified_base 1: mod_base = OTHER; note = uracil
  modified_base 5: mod_base = OTHER; note = uracil
  modified_base 6: mod_base = OTHER; note = uracil
  modified_base 9: mod_base = OTHER; note = uracil
  modified_base 12: mod_base = OTHER; note = uracil
  modified_base 16: mod_base = OTHER; note = uracil
  modified_base 20: mod_base = OTHER; note = uracil
  modified_base 22: mod_base = OTHER; note = uracil
  modified_base 23: mod_base = OTHER; note = uracil
tagattaatgatgcataagtatt

SEQ ID NO: 32 - DNA, 20 bp, synthetic construct
  source 1..20: mol_type = other DNA
aagcgagggtgggcattacc

SEQ ID NO: 33 - DNA, 20 bp, synthetic construct
  source 1..20: mol_type = other DNA
ccacctggagggcctggagc

1. A set of antisense oligonucleotides for skipping of exon 39 and 40 that bind to and/or are complementary to a polynucleotide with the nucleotide sequence as shown in SEQ ID NO: 1, preferably selected from the group consisting of SEQ ID NO: 2, SEQ ID NO: 3 and SEQ ID NO: 4, preferably selected from the group consisting of SEQ ID NO: 5 and SEQ ID NO: 6, preferably selected from the group consisting of SEQ ID NO: 7 and SEQ ID NO: 8 or a part thereof.

2. The set of antisense oligonucleotides for skipping of exon 39 and 40 according to claim 1, wherein each antisense oligonucleotide has a length of from about 8 to about 40 nucleotides, preferably from about 10 to about 40 nucleotides, more preferably from about 14 to about 30 nucleotides, more preferably from about 16 to about 24 nucleotides, such as 16, 17, 18, 19, 20, 21, 22, 23 or 24 nucleotides.

3. The set of antisense oligonucleotides for skipping of exon 39 and 40 according to claim 1 or 2, wherein the set comprises at least two antisense oligonucleotides that comprise or consist of SEQ ID NO: 9 or 10.

4. The set of antisense oligonucleotides for skipping of exon 39 and 40 according to any one of claims 1-3, wherein each antisense oligonucleotide comprises an 2′-O alkyl phosphorothioate, such as 2′-O-methyl modified ribose (RNA), 2′-O-ethyl modified ribose, 2′-O-methoxyethyl modified ribose, 2′-O-propyl modified ribose, and/or substituted derivatives of these modifications such as halogenated derivatives.

5. The set of antisense oligonucleotides for skipping of exon 39 and 40 as defined in claim 4, wherein each antisense oligonucleotide comprises a 2′-O-methoxyethyl modified ribose and a phosphorothioate backbone.

6. A viral vector expressing at least one antisense oligonucleotide for skipping exons 39 or 40 as defined in any one of the preceding claims when placed under conditions conducive to expression of the molecule.

7. A pharmaceutical composition comprising the set of antisense oligonucleotides for skipping exons 39 and 40 according to any one of claims 1-5 or the viral vector according to claim 6 and a pharmaceutically acceptable excipient.

8. A pharmaceutical composition according to claim 7, wherein the pharmaceutical composition is for intravitreal administration or intratympanic administration, preferably the composition is dosed in an amount ranged from 0.05 mg and 30 mg of total antisense oligonucleotides.

9. A pharmaceutical composition according to claims 7 and 8, wherein the pharmaceutical composition is for intravitreal administration and is dosed in an amount ranged from 0.1 and 15 mg of total antisense oligonucleotides for redirecting splicing per eye or per ear, such as about 0.1, 0.2, 0.3, 0.4, 0.5, 0.6, 0.7, 0.8, 0.9, 1.0, 2.0, 3.0, 4.0, 5.0, 6.0, 7.0, 8.0, 9.0 or 10.0 mg of total antisense oligonucleotides for redirecting splicing per eye or per ear.

10. The set of antisense oligonucleotides for skipping of exon 39 and 40 according to any one of claims 1-5, the vector according to claim 6 or the pharmaceutical composition according to any one of claims 7-9 for use as a medicament.

11. The set of antisense oligonucleotides for skipping of exon 39 and 40 according to any one of claims 1-5, the vector according to claim 6 or the pharmaceutical composition according to any one of claims 7-9 for treating an USH2A related disease or condition requiring modulating splicing of antisense oligonucleotide.

12. A method for modulating splicing of USH2A in a cell, said method comprising contacting said cell with the set of antisense oligonucleotides for skipping of exon 39 and 40 according to any one of claims 1-5, the vector according to claim 6 or the pharmaceutical composition according to any one of claims 7-9.

13. A method for the treatment of a USH2A related disease or condition requiring modulating splicing of Usher of an individual in need thereof, said method comprising contacting a cell of said individual with the set of antisense oligonucleotides for skipping of exon 39 and 40 according to any one of claims 1-5, the vector according to claim 6 or the pharmaceutical composition according to any one of claims 7-9.

14. Use of the set of antisense oligonucleotides for skipping of exon 39 and 40 according to any one of claims 1-5, the vector according to claim 6 or the pharmaceutical composition according to any one of claims 7-9 for treating an USH2A related disease or a condition requiring modulating splicing of USH2A.

15. The set of antisense oligonucleotides for skipping of exon 39 and 40 according to claim 10 or 11, the method according to claim 13 or the use according to claim 14, wherein the USH2A related disease or condition is USH2A-associated Retinitis pigmentosa (RP).
